(19) United States
(12) Patent Application Publication
(10) Pub. No.: US 2008/0280774 A1
(43) Pub. Date: Nov. 13, 2008

(54) Methods and Systems for Diagnosis, Prognosis and Selection of Treatment of Leukemia

(75) Inventors: Michael Edward Burczynski, Collegeville, PA (US); Jennifer A. Stover, Topsfield, MA (US); Frederick William Immermann, Suffern, NY (US); Andrew J. Dorner, Lexington, MA (US); Natalie C. Twine, Goffstown, NH (US)

Correspondence Address: WYETH;PATENT LAW GROUP, 5 GIRALDA FARMS, MADISON, NJ, 07940, US

(73) Assignee: Wyeth, Madison, NJ (US)

(21) Appl. No.: 11/884,169

(22) PCT Filed: Feb. 16, 2006
(86) PCT No.: PCT/US06/05855

§ 371 Date: Apr. 24, 2008

Related U.S. Application Data
(60) Provisional application No. 60/653,117, filed on Feb. 16, 2005.

(51) Int. Cl. C40B 30/04; C12Q 1/68; C40B 40/08; G01N 33/50

(52) U.S. Cl. 506/9; 435/6; 506/17; 702/20

(57) ABSTRACT

The present invention provides methods, systems and equipment for the prognosis, diagnosis and selection of treatment of AML or other types of leukemia. Genes prognostic of clinical outcome of leukemia patients can be identified according to the present invention. Leukemia disease genes can also be identified according to the present invention. These genes are differentially expressed in PBMCs of AML patients relative to disease-free humans. These genes can be used for the diagnosis or monitoring the development, progression or treatment of AML.

### CROSS-REFERENCE TO RELATED APPLICATIONS

[0001] This application claims the benefit of U.S. Ser. No. 60/653,117, filed Feb. 16, 2005.

### TECHNICAL FIELD

[0002] The present invention relates to leukemia diagnostic and prognostic genes and methods of using the same for the diagnosis, prognosis, and selection of treatment of AML or other types of leukemia.

### BACKGROUND

[0003] Acute myeloid leukemia (AML) is a heterogeneous clonal disorder typified by hyperproliferation of immature leukemic blast cells in the bone marrow. Approximately 90% of all AML cases exhibit proliferation of CD33⁺ blast cells, and CD33 is a cell surface antigen that appears to be specifically expressed in myeloblasts and myeloid progenitors but is absent from normal hematopoetic stem cells. Gemtuzumab ozogamicin (Mylotarg® or GO) is an anti-CD33 antibody conjugated to calicheamicin specifically designed to target CD33⁺ blast cells of AML patients for destruction. For reviews, see Matthews, LEUKEMIA, 12(Suppl 1):S33-S36 (1998); and Bernstein, LEUKEMIA, 14:474-475 (2000).

[0004] While gemtuzumab ozogamicin has demonstrated efficacy in patients with advanced AML, it is sometimes not completely effective as a single line agent. Both in vitro and in vivo studies have demonstrated that p-glycoprotein expression and the multi-drug resistance (MDR) phenotype are associated with reduced responsiveness to gemtuzumab ozogamicin therapy, suggesting that extrusion of gemtuzumab ozogamicin by this mechanism may be one of several important molecular pathways of gemtuzumab ozogamicin resistance (Naito, et al., LEUKEMIA, 14:1436-1443 (2000); and Linenberger, et al., BLOOD, 98:988-994 (2001)). However, the MDR phenotype fails to account for all cases found to be gemtuzumab ozogamicin resistant. While gemtuzumab ozogamicin exhibits a favorable safety profile in the majority of patients receiving Mylotarg® therapy (Sievers, et al., J CLIN. ONCOL., 19(13):3244-3254 (2001)), a small but significant number of cases of hepatic veno-occlusive disease have been reported following exposure to this therapy (Neumeister, et al., ANN. HEMATOL., 80:119-120 (2001)). Recently, GO has also been evaluated in combination with an anthracycline and cytarabine in an attempt to increase the effectiveness of GO administered as a single agent therapy (Alvarado, et al., CANCER CHEMOTHER PHARMACOL., 51:87-90 (2003)).

### SUMMARY OF THE INVENTION

[0005] It is therefore an object of the present invention to provide effective pharmacogenomic analysis to assess any relationship between gene expression and response to therapy.

[0006] It is an object of the present invention to identify leukemia prognostic genes whose expression levels are predictive of clinical outcome of leukemia patients who undergo an anti-cancer therapy.

[0007] It is a further object of the present invention to provide a method for predicting a clinical outcome of a leukemia patient as well as a method for selecting a treatment for a leukemia patient based on pharmacogenomic analysis.

[0008] It is another object of the present invention to identify leukemia diagnostic genes and to provide a method for diagnosis, or monitoring the occurrence, development, progression or treatment, of a leukemia based on the analysis of the expression levels of the diagnostic genes.

[0009] Thus, in one aspect, the present invention provides a method for predicting a clinical outcome in response to a treatment of a leukemia. The method includes the following steps: (1) measuring expression levels of one or more prognostic genes of the leukemia in a peripheral blood mononuclear cell sample derived from a patient prior to the treatment; and (2) comparing each of the expression levels to a corresponding control level, wherein the result of the comparison is predictive of a clinical outcome. “Prognostic genes” referred to in the application include, but are not limited to, any genes that are differentially expressed in peripheral blood mononuclear cells (PBMCs) or other tissues of leukemia patients with different clinical outcomes. In particular, prognostic genes include genes whose expression levels in PBMCs or other tissues of leukemia patients are correlated with clinical outcomes of the patients. Exemplary prognostic genes are shown in Table 1, Table 2, Table 3, Table 4, Table 5 and Table 6. A “clinical outcome” referred to in the application includes, but is not limited to, any response to any leukemia treatment.

[0010] The present invention is suitable for prognosis of any leukemias, including acute leukemia, chronic leukemia, lymphocytic leukemia or nonlymphocytic leukemia. In particular, the present invention is suitable for prognosis of acute myeloid leukemia (AML). Typically, the clinical outcome is measured by a response to an anti-cancer therapy. For example, the anti-cancer therapy includes administering one or more compounds selected from the group consisting of an anti-CD33 antibody, a daunorubicin, a cytarabine, a gemtuzumab ozogamicin, an anthracycline, and a pyrimidine or purine nucleotide analog. In one particular example, the present invention may be used to predict a response to a gemtuzumab ozogamicin (GO) combination therapy.

[0011] In one embodiment, the one or more prognostic genes suitable for the invention include at least a first gene selected from a first class and a second gene selected from a second class. The first class includes genes having higher expression levels in peripheral blood mononuclear cells in patients predicted to have a less desirable clinical outcome in response to the treatment. Exemplary first class genes are shown in Table 1 and Table 3. The second class includes genes having higher expression levels in peripheral blood mononuclear cells in patients predicted to have a more desirable clinical outcome in response to the treatment. Exemplary second class genes are shown in Table 2 and 4. In one embodiment, the first gene is selected from Table 3 and the second gene is selected from Table 4.

[0012] In one particular embodiment, the first gene is selected from the group consisting of zinc finger protein 217, peptide transporter 3, forkhead box O3A, T cell receptor alpha locus and putative chemokine receptor/GTP-binding protein, and the second gene is selected from the group consisting of metallothionein, fatty acid desaturase 1, an uncharacterized gene corresponding to Affymetrix ID 216336, deformed epidermal autoregulatory factor 1 and growth arrest and DNA-damage-inducible alpha. In another embodiment, the first gene is serum glucocorticoid regulated kinase and the second gene is metallothionein 1X/1L.

[0013] In some embodiments, each of the expression levels of the prognostic genes is compared to the corresponding control level which is a numerical threshold.

[0014] In some embodiments, the method of the present invention may be used to predict development of an adverse event in a leukemia patient in response to a treatment. For example, the method may be used to assess the possibility of development of veno-occlusive disease (VOD). Exemplary prognostic genes predictive of VOD are shown in Table 5 and Table 6. In one particular embodiment, the expression level of p-selectin ligand is measured to predict the risk for VOD.

[0015] In another aspect, the present invention provides a method for predicting a clinical outcome of a leukemia by taking the following steps: (1) generating a gene expression profile from a peripheral blood sample of a patient having the leukemia; and (2) comparing the gene expression profile to one or more reference expression profiles, wherein the gene expression profile and the one or more reference expression profiles contain expression patterns of one or more prognostic genes of the leukemia in peripheral blood mononuclear cells, and wherein the difference or similarity between the gene expression profile and the one or more reference expression profiles is indicative of the clinical outcome for the patient.

[0016] In one embodiment, the gene expression profile of the one or more prognostic genes may be compared to the one or more reference expression profiles by, for example, a k-nearest neighbor analysis or a weighted voting algorithm. Typically, the one or more reference expression profiles represent known or determinable clinical outcomes. In some embodiments, the gene expression profile from the patient may be compared to at least two reference expression profiles, each of which represents a different clinical outcome. For example, each reference expression profile may represent a different clinical outcome selected from the group consisting of remission to less than 5% blasts in response to the anti-cancer therapy; remission to no less than 5% blasts in response to the anti-cancer therapy; and non-remission in response to the anti-cancer therapy. In some embodiments, the one or more reference expression profiles may include a reference expression profile representing a leukemia-free human.

[0017] In some embodiments, the gene expression profile may be generated by using a nucleic acid array. Typically, the gene expression profile is generated from the peripheral blood sample of the patient prior to the anti-cancer therapy.

[0018] In one embodiment, the one or more prognostic genes include one or more genes selected from Table 3 or Table 4. In another embodiment, the one or more prognostic genes include ten or more genes selected from Table 3 or Table 4. In yet another embodiment, the one or more prognostic genes include twenty or more genes selected from Table 3 or Table 4.

[0019] In yet another aspect, the present invention provides a method for selecting a treatment for a leukemia patient. The method includes the following steps: (1) generating a gene expression profile from a peripheral blood sample derived from the leukemia patient; (2) comparing the gene expression profile to a plurality of reference expression profiles, each representing a clinical outcome in response to one of a plurality of treatments; and (3) selecting from the plurality of treatments a treatment which has a favorable clinical outcome for the leukemia patient based on the comparison in step (2), wherein the gene expression profile and the one or more reference expression profiles comprise expression patterns of one or more prognostic genes of the leukemia in peripheral blood mononuclear cells. In one embodiment, the gene expression profile may be compared to the plurality of reference expression profiles by, for example, a k-nearest neighbor analysis or a weighted voting algorithm.

[0020] In one embodiment, the one or more prognostic genes include one or more genes selected from Table 3 or Table 4. In another embodiment, the one or more prognostic genes include ten or more genes selected from Table 3 or Table 4. In yet another embodiment, the one or more prognostic genes include twenty or more genes selected from Table 3 or Table 4.

[0021] In another aspect, the present invention provides a method for diagnosis, or monitoring the occurrence, development, progression or treatment, of a leukemia. The method includes the following steps: (1) generating a gene expression profile from a peripheral blood sample of a patient having the leukemia; and (2) comparing the gene expression profile to one or more reference expression profiles, wherein the gene expression profile and the one or more reference expression profiles contain the expression patterns of one or more diagnostic genes of the leukemia in peripheral blood mononuclear cells, and wherein the difference or similarity between the gene expression profile and the one or more reference expression profiles is indicative of the presence, absence, occurrence, development, progression, or effectiveness of treatment of the leukemia in the patient. In one embodiment, the leukemia is AML. “Diagnostic genes” referred to in the application include, but are not limited to, any genes that are differentially expressed in peripheral blood mononuclear cells (PBMCs) or other tissues of leukemia patients with different disease status. In particular, diagnostic genes include genes that are differentially expressed in PBMCs or other tissues of leukemia patients relative to PBMCs of leukemia-fee patients. Exemplary diagnostic genes are shown in Table 7, Table 8 and Table 9. Diagonistic genes are also referred to as disease genes in this application.

[0022] Typically, the one or more reference expression profiles include a reference expression profile representing a disease-free human. Typically, the one or more diagnostic genes include one or more genes selected from Table 7. Preferably, the one or more diagnostic genes comprise one or more genes selected from Table 8 or Table 9. In some embodiments, the one or more diagnostic genes include ten or more genes selected from Table 7. Preferably, the one or more diagnostic genes include ten or more genes selected from Table 8 or Table 9.

[0023] In another aspect, the present invention provides an array for use in a method for predicting a clinical outcome for an AML patient. The array of the invention includes a substrate having a plurality of addresses, each of which has a distinct probe disposed thereon. In some embodiments, at least 15% of the plurality of addresses have disposed thereon probes that can specifically detect prognostic genes of AML in peripheral blood mononuclear cells. In some embodiments, at least 30% of the plurality of addresses have disposed thereon probes that can specifically detect prognostic genes of AML in peripheral blood mononuclear cells. In some embodiments, at least 50% of the plurality of addresses have disposed thereon probes that can specifically detect prognostic genes of AML in peripheral blood mononuclear cells. In some embodiments, the prognostic genes are selected from Table 1, Table 2, Table 3, Table 4, Table 5 or Table 6. The probe suitable for the present invention may be a nucleic acid probe. Alternatively, the probe suitable for the invention may be an antibody probe.

[0024] In a further aspect, the present invention provides an array for use in a method for diagnosis of AML including a substrate having a plurality of addresses, each of which has a distinct probe disposed thereon. In some embodiments, at least 15% of the plurality of addresses have disposed thereon probes that can specifically detect diagnostic genes of AML in peripheral blood mononuclear cells. In some embodiments, at least 30% of the plurality of addresses have disposed thereon probes that can specifically detect diagnostic genes of AML in peripheral blood mononuclear cells. In some embodiments, at least 50% of the plurality of addresses have disposed thereon probes that can specifically detect diagnostic genes of AML in peripheral blood mononuclear cells. In some embodiments, the diagnostic genes are selected from Table 7, Table 8 or Table 9. The probe suitable for the present invention may be a nucleic acid probe. Alternatively, the probe suitable for the present invention may be an antibody probe.

[0025] In yet another aspect, the present invention provides a computer-readable medium containing a digitally-encoded expression profile having a plurality of digitally-encoded expression signals, each of which includes a value representing the expression of a prognostic gene of AML in a peripheral blood mononuclear cell. In some embodiments, each of the plurality of digitally-encoded expression signals has a value representing a prognostic gene selected from Table 1, Table 2, Table 3, Table 4, Table 5 or Table 6. In some embodiments, each of the plurality of digitally-encoded expression signals has a value representing the expression of the prognostic gene of AML in a peripheral blood mononuclear cell of a patient with a known or determinable clinical outcome. In some embodiments, the computer-readable medium of the present invention contains a digitally-encoded expression profile including at least ten digitally-encoded expression signals.

[0026] In another aspect, the present invention provides a computer-readable medium containing a digitally-encoded expression profile having a plurality of digitally-encoded expression signals, each of which has a value representing the expression of a diagnostic gene of AML in a peripheral blood mononuclear cell. In some embodiments, each of the plurality of digitally-encoded expression signals has a value representing a diagnostic gene selected from Table 7, Table 8 or Table 9. In some embodiments, each of the plurality of digitally-encoded expression signals has a value representing the expression of the diagnostic gene of AML in a peripheral blood mononuclear cell of an AML-free human. In some embodiments, the computer-readable medium of the present invention contains a digitally-encoded expression profile including at least ten digitally-encoded expression signals.

[0027] In yet another aspect, the present invention provides a kit for prognosis of a leukemia, e.g., AML. The kit includes a) one or more probes that can specifically detect prognostic genes of AML in peripheral blood mononuclear cells; and b) one or more controls, each representing a reference expression level of a prognostic gene detectable by the one or more probes. In some embodiments, the kit of the present invention includes one or more probes that can specifically detect prognostic genes selected from Table 1, Table 2, Table 3, Table 4, Table 5 or Table 6.

[0028] In another aspect, the present invention provides a kit for diagnosis of a leukemia, e.g., AML. The kit includes a) one or more probes that can specifically detect diagnostic genes of AML in peripheral blood mononuclear cells; and b) one or more controls, each representing a reference expression level of a prognostic gene detectable by the one or more probes. In some embodiments, the kit of the present invention includes one or more probes that can specifically detect diagnostic genes selected from Table 7, Table 8 or Table 9.

[0029] Other features, objects, and advantages of the present invention are apparent in the detailed description that follows. It should be understood, however, that the detailed description, while indicating embodiments of the present invention, is given by way of illustration only, not limitation. Various changes and modifications within the scope of the invention will become apparent to those skilled in the art from the detailed description.

### BRIEF DESCRIPTION OF THE DRAWINGS

[0030] The drawings are provided for illustration, not limitation.

[0031] FIG. 1A demonstrates relative PBMC expression levels of 98 class correlated genes selected from Tables 1 and 2. Among the 98 genes, 49 genes had elevated expression levels in PBMCs of patients who responded to Mylotarg combination therapy (R) relative to patients who did not respond to the therapy (NR), and the other 49 genes had elevated expression levels in PBMCs of the non-responding patients (NR) compared to the responding patients (R).

[0032] FIG. 1B shows cross validation results for each sample using a 154-gene class predictor consisting of the genes in Tables 1 and 2, where a leave-one out cross validation was performed and the prediction strengths were calculated for each sample. Samples are ordered in the same order as in FIG. 1A.

[0033] FIG. 2 illustrates an unsupervised hierarchical clustering of PBMC gene expression profiles from normal patients, patients with AML, or patients with MDS using the 7879 transcripts detected in one or more profiles with a maximal frequency greater than or equal to 10 ppm. Data were log transformed and gene expression values were median centered, and profiles were clustered using an average linkage clustering approach with an uncentered correlation similarity metric. The two main clusters of normal and non-normal are denoted as clusters 1 and 2. The subgroup in cluster 2 possessing a preponderance of AML is indicated as “AML-like” while the subgroup in cluster 2 possessing a preponderance of MDS is indicated as “MDS-like.”

[0034] FIG. 3 illustrates a gene ontology based annotation of transcripts altered during GO combination therapy of AML patients. The 52 transcripts exhibiting 3-fold or greater repression over treatment were annotated into each of the twelve categories listed. Transcripts in the immune response category were most significantly overrepresented in the group of transcripts elevated over therapy, while uncategorized transcripts were most significantly overrepresented in the group of transcripts repressed during therapy.

[0035] FIG. 4 illustrates levels of p-selectin ligand transcript in the pretreatment PBMCs of 4 AML patients who eventually experienced veno-occlusive disease (VOD) (left panel) and in pretreatment PBMCs of 32 patients who did not experience VOD (right panel). Frequency (in ppm) based on microarray analysis is plotted on the y-axis and the level of p-selectin ligand in each individual sample in each group is plotted as a discrete symbol.

[0036] FIG. 5 illustrates levels of MDR1 transcript in pretreatment PBMCs of 8 AML patients who failed to respond (NR) and in pretreatment PBMCs of 28 patients who responded (R). Frequency (in ppm) based on microarray analysis is plotted on the y-axis and the level of MDR1 transcript in each individual of the 36 pretreatment PBMC samples is indicated by each column. The p-value is based on an unpaired Student's t-test assuming unequal variances.

[0037] FIG. 6 illustrates the transcript levels of various ABC cassette transporters in PBMC samples of AML patients prior to therapy. Frequency (in ppm) based on microarray analysis is plotted on the y-axis and the average level plus standard deviation of each transporter in the NR and R groups is indicated. No significant differences in expression between NR and R were detected for any of the sequences encoding ABC transporters evaluated on U133A.

[0038] FIG. 7 illustrates levels of CD33 cell surface antigen transcript in pretreatment PBMCs of 8 patients who failed to respond (NR) and in pretreatment PBMCs of 28 patients who responded (R). Frequency (in ppm) based on microarray analysis is plotted on the y-axis and the level of CD33 transcript in each individual of the 36 pretreatment PBMC samples is indicated by each column. The p-value is based on an unpaired Student's t-test assuming unequal variances.

[0039] FIG. 8 illustrates the accuracy of a 10-gene classifier for distinguishing pretreatment PBMCs from eventual responders and eventual nonresponders to therapy. Data from baseline PBMC profiles from AML patients were scale-frequency normalized together using a total of 11382 sequences possessing at least one present call and one value of greater than or equal to 10 ppm across baseline profiles from each of two independent clinical studies involving GO-based therapy. Analyses were conducted following a z-score normalization step in Genecluster. Panel A depicts overall accuracy in a 36 member training set for models containing increasing numbers of features (transcript sequences) built using a binary classification approach with a S2N similarity metric that used median values for the class estimate. The smallest classifier (10-gene) yielding the highest overall accuracy is indicated (arrow). Panel B depicts ten-fold cross validation accuracy of the 10-gene classifier. A weighted voting algorithm was used to assign class membership using the 10-gene classifier. Confidence scores for each prediction call are indicated by columns where a downward deflection indicates a call of “NR” and an upward deflection indicates a call of “R.” True non-responders are indicated by light columns and true responders are indicated by dark columns. In this cross-validation 4/8 non-responders were correctly identified and 24/28 responders were correctly identified.

[0040] FIG. 9 illustrates the use of the 10-gene classifier to evaluate baseline PBMCs from AML patients from an independent clinical trial. The weighted voting algorithm was used to assign class membership using the 10-gene classifier. Confidence scores for each prediction call are indicated by columns where a downward deflection indicates a call of “NR” and an upward deflection indicates a call of “R.” True non-responders are indicated by light columns and true responders are indicated by dark columns. In this independent test set, 4/7 non-responders were correctly identified and 7/7 responders were correctly identified.

[0041] FIG. 10 illustrates expression levels of two genes in AML PBMCs inversely correlated with response to GO-based therapies. Panel A represents a two-dimensional plot of Affymetrix-based expression levels (in ppm) of serum/glucocorticoid regulated kinase (Y-axes) and metallothionein 1X, 1L (X-axes) in PMBC samples from AML patients. Levels of each transcript in each patient are plotted where non-responders are indicated by squares and responders are indicated by circles. The shadow indicates the area of the X-Y plot encompassing the largest number of non-responders and the smallest number of responders, defining the boundaries for this pairwise classifier. Implementing requirements for expression levels of less than 30 ppm for serum glucocorticoid regulated kinase and expression levels of greater than 30 ppm for metallothionein 1X, 1L, would have successfully identified 6/8 non-responders and only falsely identified 2 of 28 responders as non-responders in the original dataset of 36 samples. Panel B illustrates an evaluation of the 2-gene classifier in 14 AML samples from an independent clinical trial. Implementation of the same requirements correctly identified 4/7 non-responders and all responders (7/7) were also correctly identified.

### DETAILED DESCRIPTION

[0042] The present invention provides methods, reagents and systems useful for prognosis or selection of treatment of AML or other types of leukemia. These methods, reagents and systems employ leukemia prognostic genes which are differentially expressed in peripheral blood samples of leukemia patients who have different clinical outcomes. The present invention also provides methods, reagents and systems for diagnosis, or monitoring the occurrence, development, progression or treatment, of AML or other types of leukemia. These methods, reagents and systems employ diagnostic genes which are differentially expressed in peripheral blood samples of leukemia patients with different disease status. Thus, the present invention represents a significant advance in clinical pharmacogenomics and leukemia treatment.

[0043] Various aspects of the invention are described in further detail in the following subsections. The use of subsections is not meant to limit the invention. Each subsection may apply to any aspect of the invention. In this application, the use of “or” means “and/or” unless stated otherwise.

### Leukemia and Leukemia Treatment

[0044] The types of leukemia that are amenable to the present invention include, but are not limited to, acute leukemia, chronic leukemia, lymphocytic leukemia, or nonlymphocytic leukemia (e.g., myelogenous, monocytic, or erythroid). Acute leukemia includes, for example, AML or ALL (acute lymphoblastic leukemia). Chronic leukemia includes, for example, CML (chronic myelogenous leukemia), CLL (chronic lymphocytic leukemia), or hairy cell leukemia. The present invention also contemplates genes that are prognostic of clinical outcome of patients having myelodysplastic syndromes (MDS).

[0045] Any leukemia treatment regime can be analyzed according to the present invention. Examples of these leukemia treatments include, but are not limited to, chemotherapy, drug therapy, gene therapy, immunotherapy, biological therapy, radiation therapy, bone marrow transplantation, surgery, or a combination thereof. Other conventional, non-conventional, novel or experimental therapies, including treatments under clinical trials, can also be evaluated according to the present invention.

[0046] A variety of anti-cancer agents can be used to treat leukemia. Examples of these agents include, but are not limited to, alkylators, anthracyclines, antibiotics, biphosphonates, folate antagonists, inorganic arsenates, microtubule inhibitors, nitrosoureas, nucleoside analogs, retinoids, or topoisomerase inhibitors.

[0047] Examples of alkylators include, but are not limited to, busulfan (Myleran, Busulfex), chlorambucil (Leukeran), cyclophosphamide (Cytoxan, Neosar), melphalan, L-PAM (Alkeran), dacarbazine (DTIC-Dome), and temozolamide (Temodar). Examples of anthracyclines include, but are not limited to, doxorubicin (Adriamycin, Doxil, Rubex), mitoxantrone (Novantrone), idarubicin (Idamycin), valrubicin (Valstar), and epirubicin (Ellence). Examples of antibiotics include, but are not limited to, dactinomycin, actinomycin D (Cosmegen), bleomycin (Blenoxane), and daunorubicin, daunomycin (Cerubidine, DanuoXome). Examples of biphosphonate inhibitors include, but are not limited to, zoledronate (Zometa). Examples of folate antagonists include, but are not limited to, methotrexate and tremetrexate. Examples of inorganic arsenates include, but are not limited to, arsenic trioxide (Trisenox). Examples of microtubule inhibitors, which may inhibit either microtubule assembly or disassembly, include, but are not limited to, vincristine (Oncovin), vinblastine (Velban), paclitaxel (Taxol, Paxene), vinorelbine (Navelbine), docetaxel (Taxotere), epothilone B or D or a derivative of either, and discodermolide or its derivatives. Examples of nitrosoureas include, but are not limited to, procarbazine (Matulane), lomustine, CCNU (CeeBU), carmustine (BCNU, BiCNU, Gliadel Wafer), and estramustine (Emcyt). Examples of nucleoside analogs include, but are not limited to, mercaptopurine, 6-MP (Purinethol), fluorouracil, 5-FU (Adrucil), thioguanine, 6-TG (Thioguanine), hydroxyurea (Hydrea), cytarabine (Cytosar-U, DepoCyt), floxuridine (FUDR), fludarabine (Fludara), pentostatin (Nipent), cladribine (Leustatin, 2-CdA), gemcitabine (Gemzar), and capecitabine (Xeloda). Examples of retinoids include, but are not limited to, tretinoin, ATRA (Vesanoid), alitretinoin (Panretin), and bexarotene (Targretin). Examples of topoisomerase inhibitors include, but are not limited to, etoposide, VP-16 (Vepesid), teniposide, VM-26 (Vumon), etoposide phosphate (Etopophos), topotecan (Hycamtin), and irinotecan (Camptostar). Therapies including the use of any of these anti-cancer agents can be evaluated according to the present invention.

[0048] Leukemia can also be treated by antibodies that specifically recognize diseased or otherwise unwanted cells. Antibodies suitable for this purpose include, but are not limited to, polyclonal, monoclonal, mono-specific, poly-specific, humanized, human, single-chain, chimeric, synthetic, recombinant, hybrid, mutated, grafted, or in vitro generated antibodies. Suitable antibodies can also be Fab, F(ab′)₂, Fv, scFv, Fd, dAb, or other antibody fragments that retain the antigen-binding function. In many cases, an antibody employed in the present invention can bind to a specific antigen on the diseased or unwanted cells (e.g., the CD33 antigen on myeloblasts or myeloid progenitor cells) with a binding affinity of at least 10⁻⁶ M⁻¹, 10⁻⁷ M⁻¹, 10⁻⁸ M⁻¹, 10⁻⁹ M⁻¹, or stronger.

[0049] Many antibodies employed in the present invention are conjugated with a cytotoxic or otherwise anticellular agent which can kill or suppress the growth or division of cells. Examples of cytotoxic or anticellular agents include, but are not limited to, the anti-neoplastic agents described above, and other chemotherapeutic agents, radioisotopes or cytotoxins. Two or more different cytotoxic moieties can be coupled to one antibody, thereby accommodating variable or even enhanced anti-cancer activities.

[0050] Linking or coupling one or more cytotoxic moieties to an antibody may be achieved by a variety of mechanisms, for example, covalent binding, affinity binding, intercalation, coordinate binding and complexation. Preferred binding methods are those involving covalent binding, such as using chemical cross-linkers, natural peptides or disulfide bonds.

[0051] Covalent binding can be achieved, for example, by direct condensation of existing side chains or by the incorporation of external bridging molecules. Many bivalent or polyvalent agents are useful in coupling protein molecules to other proteins, peptides or amine functions. Examples of coupling agents are, without limitation, carbodiimides, diisocyanates, glutaraldehyde, diazobenzenes, and hexamethylene diamines.

[0052] In one embodiment, an antibody employed in the present invention is first derivatized before being attaching with a cytotoxic moiety. “Derivatize” means chemical modification(s) of the antibody substrate with a suitable cross-linking agent. Examples of cross-linking agents for use in this manner include the disulfide-bond containing linkers SPDP (N-succinimidyl-3-(2-pyridyldithio)propionate) and SMPT (4-succinimidyl-oxycarbonyl-α-methyl-α(2-pyridyldithio)toluene). Biologically releasable bonds can also be used to construct a clinically active antibody, such that a cytotoxic moiety can be released from the antibody once it binds to or enters the target cell. Numerous types of linking constructs are known for this purpose (e.g., disulfide linkages).

[0053] Anti-neoplastic agent(s) employed in a leukemia treatment regime can be administered via any common route so long as the target tissue or cell is available via that route. This includes, but is not limited to, intravenous, catheterization, orthotopic, intradermal, subcutaneous, intramuscular, intraperitoneal intrtumoral, oral, nasal, buccal, rectal, vaginal, or topical administration. Selection of anti-neoplastic agents and dosage regimes may depend on various factors, such as the drug combination employed, the particular disease being treated, and the condition and prior history of the patient. Specific dose regimens for known and approved anti-neoplastic agents can be found in the current version of Physician's Desk Reference, Medical Economics Company, Inc., Oradell, N.J.

[0054] In addition, a leukemia treatment regime can include a combination of different types of therapies, such as chemotherapy plus antibody therapy. The present invention contemplates identification of prognostic genes for all types of leukemia treatment regime.

[0055] In one aspect, the present invention features identification of genes that are prognostic of clinical outcome of AML patients who undergo an anti-cancer treatment. An AML treatment can include a remission induction therapy, a postremission therapy, or a combination thereof. The purpose of the remission induction therapy is to attain remission by killing the leukemia cells in the blood or bone marrow. The purpose of the postremission therapy is to maintain remission by killing any remaining leukemia cells that may not be active but could begin to regrow and cause a relapse.

[0056] Standard remission induction therapies for AML patients include, but are not limited to, combination chemotherapy, stem cell transplantation, high-dose combination chemotherapy, all-trans retinoic acid (ATRA) plus chemotherapy, or intrathecal chemotherapy. Standard postremission therapies include, but are not limited to, combination chemotherapy, high-dose chemotherapy and stem cell transplantation using donor stem cells, or high-dose chemotherapy and stem cell transplantation using the patient's stem cells with or without radiation therapy. For recurrent AML patients, standard treatments include, but are not limited to, combination chemotherapy, biologic therapy with monoclonal antibodies, stem cell transplantation, low dose radiation therapy as palliative therapy to relieve symptoms and improve quality of life, or arsenic trioxide therapy. Nonstandard therapies, including treatments under clinical trials, are also contemplated by the present invention.

[0057] In many embodiments, the treatment regimes described in U.S. Patent Application Publication No. 20040152632 are employed to treat AML or MDS. Genes prognostic of patient outcome under these treatment regimes can be identified according to the present invention. In one example, the treatment regime includes administration of at least one chemotherapy drug and an anti-CD33 antibody conjugated with a cytotoxic agent. The chemotherapy drug can be selected, without limitation, from the group consisting of an anthracycline and a pyrimidine or purine nucleoside analog. The cytotoxic agent can be, for example, a calicheamicin or an esperamicin.

[0058] Anthracyclines suitable for treating AML or MDS include, but are not limited to, doxorubicin, daunorubicin, idarubicin, aclarubicin, zorubicin, mitoxantrone, epirubicin, carubicin, nogalamycin, menogaril, pitarubicin, and valrubicin. Pyrimidine or purine nucleoside analogs useful for treating AML or MDS include, but are not limited to, cytarabine, gemcitabine, trifluridine, ancitabine, enocitabine, azacitidine, doxifluridine, pentostatin, broxuridine, capecitabine, cladribine, decitabine, floxuridine, fludarabine, gougerotin, puromycin, tegafur, tiazofurin, or tubercidin. Other anthracyclines and pyrimidine/purine nucleoside analogs can also be used in the present invention.

[0059] In a further example, the AML/MDS treatment regime includes administration of gemtuzumab ozogamicin (GO), daunorubicin and cytarabine to a patient in need of the treatment. Gemtuzumab ozogamicin can be administered, without limitation, in an amount of about 3 mg/m² to about 9 mg/m² per day, such as about 3, 4, 5, 6, 7, 8 or 9 mg/m² per day. Daunorubicin can be administered, for example, in an amount of about 45 mg/m² to about 60 mg/m² per day, such as about 45, 50, 55 or 60 mg/m² per day. Cytarabine can be administered, without limitation, in an amount of about 100 mg/m² to about 200 mg/m² per day, such as about 100, 125, 150, 175 or 200 mg/m² per day. In one example, the daunorubicin employed in the treatment regime is daunorubicin hydrochloride.

### Clinical Outcome

[0060] Clinical outcome of leukemia patients can be assessed by a number of criteria. Examples of clinical outcome measures include, but are not limited to, complete remission, partial remission, non-remission, survival, development of adverse events, or any combination thereof. Patients with complete remission show less than 5% blast cells in the bone marrow after the treatment. Patients with partial remission exhibit a decrease in the blast percentage to certain degree but do not achieve normal hematopoiesis with less than 5% blast cells. The blast percentage in the bone marrow of non-remission patients does not decrease in a significant way in response to the treatment.

[0061] In many cases, the peripheral blood samples used for the identification of the prognostic genes are “baseline” or “pretreatment” samples. These samples are isolated from respective leukemia patients prior to a therapeutic treatment and can be used to identify genes whose baseline peripheral blood expression profiles are correlated with clinical outcome of these leukemia patients in response to the treatment. Peripheral blood samples isolated at other treatment or disease stages can also be used to identify leukemia prognostic genes.

[0062] A variety of types of peripheral blood samples can be used in the present invention. In one embodiment, the peripheral blood samples are whole blood samples. In another embodiment, the peripheral blood samples comprise enriched PBMCs. By “enriched,” it means that the percentage of PBMCs in the sample is higher than that in whole blood. In some cases, the PBMC percentage in an enriched sample is at least 1, 2, 3, 4, 5 or more times higher than that in whole blood. In some other cases, the PBMC percentage in an enriched sample is at least 90%, 95%, 98%, 99%, 99.5%, or more. Blood samples containing enriched PBMCs can be prepared using any method known in the art, such as Ficoll gradients centrifugation or CPTs (cell purification tubes).

### Gene Expression Analysis

[0063] The relationship between peripheral blood gene expression profiles and patient outcome can be evaluated by using global gene expression analyses. Methods suitable for this purpose include, but are not limited to, nucleic acid arrays (such as cDNA or oligonucleotide arrays), 2-dimensional SDS-polyacrylamide gel electrophoresis/mass spectrometry, and other high throughput nucleotide or polypeptide detection techniques.

[0064] Nucleic acid arrays allow for quantitative detection of the expression levels of a large number of genes at one time. Examples of nucleic acid arrays include, but are not limited to, Genechip® microarrays from Affymetrix (Santa Clara, Calif.), cDNA microarrays from Agilent Technologies (Palo Alto, Calif.), and bead arrays described in U.S. Pat. Nos. 6,288,220 and 6,391,562.

[0065] The polynucleotides to be hybridized to a nucleic acid array can be labeled with one or more labeling moieties to allow for detection of hybridized polynucleotide complexes. The labeling moieties can include compositions that are detectable by spectroscopic, photochemical, biochemical, bioelectronic, immunochemical, electrical, optical or chemical means. Exemplary labeling moieties include radioisotopes, chemiluminescent compounds, labeled binding proteins, heavy metal atoms, spectroscopic markers such as fluorescent markers and dyes, magnetic labels, linked enzymes, mass spectrometry tags, spin labels, electron transfer donors and acceptors, and the like. Unlabeled polynucleotides can also be employed. The polynucleotides can be DNA, RNA, or a modified form thereof.

[0066] Hybridization reactions can be performed in absolute or differential hybridization formats. In the absolute hybridization format, polynucleotides derived from one sample, such as PBMCs from a patient in a selected outcome class, are hybridized to the probes on a nucleic acid array. Signals detected after the formation of hybridization complexes correlate to the polynucleotide levels in the sample. In the differential hybridization format, polynucleotides derived from two biological samples, such as one from a patient in a first outcome class and the other from a patient in a second outcome class, are labeled with different labeling moieties. A mixture of these differently labeled polynucleotides is added to a nucleic acid array. The nucleic acid array is then examined under conditions in which the emissions from the two different labels are individually detectable. In one embodiment, the fluorophores Cy3 and Cy5 (Amersham Pharmacia Biotech, Piscataway N.J.) are used as the labeling moieties for the differential hybridization format.

[0067] Signals gathered from a nucleic acid array can be analyzed using commercially available software, such as those provided by Affymetrix or Agilent Technologies. Controls, such as for scan sensitivity, probe labeling and cDNA/cRNA quantitation, can be included in the hybridization experiments. In many embodiments, the nucleic acid array expression signals are scaled or normalized before being subject to further analysis. For instance, the expression signals for each gene can be normalized to take into account variations in hybridization intensities when more than one array is used under similar test conditions. Signals for individual polynucleotide complex hybridization can also be normalized using the intensities derived from internal normalization controls contained on each array. In addition, genes with relatively consistent expression levels across the samples can be used to normalize the expression levels of other genes. In one embodiment, the expression levels of the genes are normalized across the samples such that the mean is zero and the standard deviation is one. In another embodiment, the expression data detected by nucleic acid arrays are subject to a variation filter which excludes genes showing minimal or insignificant variation across all samples.

### Correlation Analysis

[0068] The gene expression data collected from nucleic acid arrays can be correlated with clinical outcome using a variety of methods. Methods suitable for this purpose include, but are not limited to, statistical methods (such as Spearman's rank correlation, Cox proportional hazard regression model, ANOVA/t test, or other rank tests or survival models) and class-based correlation metrics (such as nearest-neighbor analysis).

[0069] In one embodiment, patients with a specified leukemia (e.g., AML) are divided into at least two classes based on their responses to a therapeutic treatment. The correlation between peripheral blood gene expression (e.g., PBMC gene expression) and the patient outcome classes is then analyzed by a supervised cluster or learning algorithm. Supervised algorithms suitable for this purpose include, but are not limited to, nearest-neighbor analysis, support vector machines, the SAM method, artificial neural networks, and SPLASH. Under a supervised analysis, clinical outcome of each patient is either known or determinable. Genes that are differentially expressed in peripheral blood cells (e.g., PBMCs) of one class of patients relative to another class of patients can be identified. These genes can be used as surrogate markers for predicting clinical outcome of a leukemia patient of interest. Many of the genes thus identified are correlated with a class distinction that represents an idealized expression pattern of these genes in patients of different outcome classes.

[0070] In another embodiment, patients with a specified leukemia (e.g., AML) can be divided into at least two classes based on their peripheral blood gene expression profiles. Methods suitable for this purpose include unsupervised clustering algorithms, such as self-organized maps (SOMs), k-means, principal component analysis, and hierarchical clustering. A substantial number (e.g., at least 50%, 60%, 70%, 80%, 90%, or more) of patients in one class may have a first clinical outcome, and a substantial number of patients in another class may have a second clinical outcome. Genes that are differentially expressed in the peripheral blood cells of one class of patients relative to another class of patients can be identified. These genes can also be used as prognostic markers for predicting clinical outcome of a leukemia patient of interest.

[0071] In yet another embodiment, patients with a specified leukemia (e.g., AML) can be divided into three or more classes based on their clinical outcomes or peripheral blood gene expression profiles. Multi-class correlation metrics can be employed to identify genes that are differentially expressed in one class of patients relative to another class. Exemplary multi-class correlation metrics include, but are not limited to, those employed by GeneCluster 2 software provided by MIT Center for Genome Research at Whitehead Institute (Cambridge, Mass.).

[0072] In a further embodiment, nearest-neighbor analysis (also known as neighborhood analysis) is used to correlate peripheral blood gene expression profiles with clinical outcome of leukemia patients. The algorithm for neighborhood analysis is described in Golub, et al., SCIENCE, 286: 531-537 (1999); Slonim, et al., PROCS. OF THE FOURTH ANNUAL INTERNATIONAL CONFERENCE ON COMPUTATIONAL MOLECULAR BIOLOGY, Tokyo, Japan, April 8-11, p 263-272 (2000); and U.S. Pat. No. 6,647,341. Under one version of the neighborhood analysis, the expression profile of each gene can be represented by an expression vector g=(e₁, e₂, e₃, . . . , eₙ), where eᵢ corresponds to the expression level of gene “g” in the ith sample. A class distinction can be represented by an idealized expression pattern c=(c₁, c₂, c₃, . . . , cₙ), where cᵢ=1 or −1, depending on whether the ith sample is isolated from class 0 or class 1. Class 0 may include patients having a first clinical outcome, and class 1 includes patients having a second clinical outcome. Other forms of class distinction can also be employed. Typically, a class distinction represents an idealized expression pattern, where the expression level of a gene is uniformly high for samples in one class and uniformly low for samples in the other class.

[0073] The correlation between gene “g” and the class distinction can be measured by a signal-to-noise score:

P(g,c)=[μ₁(g)−μ₂(g)]/[σ₁(g)+σ₂(g)]

where μ₁(g) and μ₂(g) represent the means of the log-transformed expression levels of gene “g” in class 0 and class 1, respectively, and σ₁(g) and σ₂(g) represent the standard deviation of the log-transformed expression levels of gene “g” in class 0 and class 1, respectively. A higher absolute value of a signal-to-noise score indicates that the gene is more highly expressed in one class than in the other. In one example, the samples used to derive the signal-to-noise scores comprise enriched or purified PBMCs and, therefore, the signal-to-noise score P(g,c) represents a correlation between the class distinction and the expression level of gene “g” in PBMCs.

[0074] The correlation between gene “g” and the class distinction can also be measured by other methods, such as by the Pearson correlation coefficient or the Euclidean distance, as appreciated by those skilled in the art.

[0075] The significance of the correlation between peripheral blood gene expression profiles and the class distinction can be evaluated using a random permutation test. An unusually high density of genes within the neighborhoods of the class distinction, as compared to random patterns, suggests that many genes have expression patterns that are significantly correlated with the class distinction. The correlation between genes and the class distinction can be diagrammatically viewed through a neighborhood analysis plot, in which the y-axis represents the number of genes within various neighborhoods around the class distinction and the x-axis indicates the size of the neighborhood (i.e., P(g,c)). Curves showing different significance levels for the number of genes within corresponding neighborhoods of randomly permuted class distinctions can also be included in the plot.

[0076] In many embodiments, the prognostic genes employed in the present invention are above the median significance level in the neighborhood analysis plot. This means that the correlation measure P(g,c) for each prognostic gene is such that the number of genes within the neighborhood of the class distinction having the size of P(g,c) is greater than the number of genes within the corresponding neighborhoods of randomly permuted class distinctions at the median significance level. In many other embodiments, the prognostic genes employed in the present invention are above the 40%, 30%, 20%, 10%, 5%, 2%, or 1% significance level. As used herein, x % significance level means that x % of random neighborhoods contain as many genes as the real neighborhood around the class distinction.

[0077] Class predictors can be constructed using the prognostic genes of the present invention. These class predictors can be used to assign a leukemia patient of interest to an outcome class. In one embodiment, the prognostic genes employed in a class predictor are limited to those shown to be significantly correlated with a class distinction by the permutation test, such as those at above the 1%, 2%, 5%, 10%, 20%, 30%, 40%, or 50% significance level. In another embodiment, the PBMC expression level of each prognostic gene in a class predictor is substantially higher or substantially lower in one class of patients than in another class of patients. In still another embodiment, the prognostic genes in a class predictor have top absolute values of P(g,c). In yet another embodiment, the p-value under a Student's t-test (e.g., two-tailed distribution, two sample unequal variance) for each prognostic gene in a class predictor is no more than 0.05, 0.01, 0.005, 0.001, 0.0005, 0.0001, or less. For each prognostic gene, the p-value suggests the statistical significance of the difference observed between the average PBMC expression profiles of the gene in one class of patients versus another class of patients. Lesser p-values indicate more statistical significance for the differences observed between different classes of leukemia patients.

[0078] The SAM method can also be used to correlate peripheral blood gene expression profiles with different outcome classes. The prediction analysis of microarrays (PAM) method can then be used to identify class predictors that can best characterize a predefined outcome class and predict the class membership of new samples. See Tibshirani, et al., PROC. NATL. ACAD. SCI. U.S.A., 99:6567-6572 (2002).

[0079] In many embodiments, a class predictor of the present invention has high prediction accuracy under leave-one-out cross validation, 10-fold cross validation, or 4-fold cross validation. For instance, a class predictor of the present invention can have at least 50%, 60%, 70%, 80%, 90%, 95%, or 99% accuracy under leave-one-out cross validation, 10-fold cross validation, or 4-fold cross validation. In a typical k-fold cross validation, the data is divided into k subsets of approximately equal size. The model is trained k times, each time leaving out one of the subsets from training and using the omitted subset as the test samples to calculate the prediction error. If k equals the sample size, it becomes the leave-one-out cross validation.

[0080] Other class-based correlation metrics or statistical methods can also be used to identify prognostic genes whose expression profiles in peripheral blood samples are correlated with clinical outcome of leukemia patients. Many of these methods can be performed by using commercial or publicly accessible softwares.

[0081] Other methods capable of identifying leukemia prognostic genes include, but are not limited, RT-PCR, Northern Blot, in situ hybridization, and immunoassays such as ELISA, RIA or Western Blot. These genes are differentially expressed in peripheral blood cells (e.g., PBMCs) of one class of patients relative to another class of patients. In many cases, the average peripheral blood expression level of each of these genes in one class of patients is statistically different from that in another class of patients. For instance, the p-value under an appropriate statistical significance test (e.g., Student's t-test) for the observed difference can be no more than 0.05, 0.01, 0.005, 0.001, 0.0005, 0.0001, or less. In many other cases, each prognostic gene thus identified has at least 2-, 3-, 4-, 5-, 10-, or 20-fold difference in the average PBMC expression level between one class of patients and another class of patients.

### Identification of AML Prognostic Genes Using HG-U133A Microarrays

[0082] As an example, the present invention characterized signatures in peripheral blood of AML patients that are indicative of remission in response to a chemotherapy regimen consisting of daunorubicin and cytarabine induction therapy with concomitant administration of GO. In particular, the present invention employed a pharmacogenomic approach to identify transcriptional patterns in peripheral blood samples taken from AML patients prior to treatment that were correlated with positive response to the therapy regimen.

[0083] Of the 36 AML patients who consented for pharmacogenomic analysis, 28 achieved a positive response and 8 failed to respond to the treatment regimen following 36 days of induction therapy. Genecluster's default correlation metric (Golub, et al., SCIENCE, 286: 531-537 (1999)) was used to identify genes with expression levels highly correlated with responder and non-responder profiles in the entire set of samples. The low number of non-responders in the pharmacogenomic consented patients precluded division of the pretreatment blood samples into a training and test set. Therefore all samples were used to identify gene classifiers that displayed high accuracies for classification of responder samples versus non-responder samples.

[0084] Table 1 lists genes which had higher pretreatment PBMC expression levels in AML patients who eventually failed to respond to the GO combination chemotherapy (non-remission or partial remission), compared to AML patients who responded to the therapy (remission to less than 5% blasts). Genes showing greatest fold elevation in non-responding patients at baseline PBMCs are listed in Table 3. Table 2 describes transcripts that had higher pretreatment expression levels in PBMCs of AML patients who eventually respond to the GO combination chemotherapy, compared to AML patients who did not respond to the therapy. Genes showing greatest fold elevation in responding patients at baseline PBMCs are listed in Table 4. “Fold Change (NR/R)” denotes the ratio of the mean expression level of a gene in PBMCs of non-responding AML patients over that in responding AML patients. “Fold Change (R/NR)” represents the ratio of the mean expression level of a gene in PBMCs of responding AML patients over that in non-responding AML patients. In each table, the transcripts are presented in order of the signal to noise metric score calculated by the supervised algorithm described in Examples. Each gene depicted in Tables 1-4 and the corresponding unigene(s) were identified according to Affymetrix annotations.

[0085] Classifiers consisting of genes selected from Tables 1 and 2 were built and evaluated for class prediction accuracy. Each classifier included the top n gene(s) in Table 1 and the top n gene(s) in Table 2, where n represents an integer no less than 1. For example, a first classifier being evaluated included Gene Nos. 1 and 78, a second classifier included Gene Nos. 1-2 and 78-79, a third classifier included Gene Nos. 1-3 and 78-80, a fourth classifier included Gene Nos. 1-4 and 78-81, and so on. Each classifier thus constructed produced significant prediction accuracy. For instance, a classifier consisting of all of the 154 genes in Tables 1 and 2 yielded 81% overall prediction accuracy by 4-fold cross validation on the peripheral blood profiles used in the present study.

[0086] Correlation analysis between the pretreatment transcriptional patterns and the clinical outcomes, including occurrence of adverse events, are further discussed in Examples. Additional classifiers are also disclosed in Examples.

TABLE 1
Genes Having Higher Baseline Peripheral Blood Expression
Levels in Non-Responding Patients

| | | SEQ | | Fold | | |
|---|---|---|---|---|---|---|
| Gene | | ID | Unigene | Change | Gene | |
| No. | Qualifier | NO: | No. | (NR/R) | Symbol | Gene Name |
| 1 | 208581_x_at | 1 | Hs.278462 | 2.04 | MT1L, | metallothionein 1L, metallothionein |
| | | | | | MT1X | 1X |
| 2 | 208963_x_at | 2 | Hs.132898 | 1.34 | FADS1 | fatty acid desaturase 1 |
| 3 | 216336_x_at | 3 | | 1.73 | | unknown |
| 4 | 209407_s_at | 4 | Hs.6574 | 1.88 | DEAF1 | deformed epidermal autoregulatory |
| | | | | | | factor 1 (Drosophila) |
| 5 | 203725_at | 5 | Hs.80409 | 1.84 | GADD45A | growth arrest and DNA-damage- |
| | | | | | | inducible, alpha |
| 6 | 205366_s_at | 6 | Hs.98428 | 1.69 | HOXB6 | homeo box B6 |
| 7 | 209480_at | 7 | Hs.73931 | 1.61 | HLA-DQB1 | major histocompatibility complex, |
| | | | | | | class II, DQ beta 1 |
| 8 | 204430_s_at | 8 | Hs.33084 | 1.61 | SLC2A5 | solute carrier family 2 (facilitated |
| | | | | | | glucose/fructose transporter), |
| | | | | | | member 5 |
| 9 | 204468_s_at | 9 | Hs.78824 | 3.62 | TIE | tyrosine kinase with immunoglobulin |
| | | | | | | and epidermal growth factor |
| | | | | | | homology domains |
| 10 | 212747_at | 10 | Hs.20060 | 1.10 | KIAA0229 | KIAA0229 protein |
| 11 | 205227_at | 11 | Hs.173880 | 1.88 | IL1RAP | interleukin 1 receptor accessory |
| | | | | | | protein |
| 12 | 201539_s_at | 12 | Hs.239069 | 1.09 | FHL1 | four and a half LIM domains 1 |
| 13 | 203373_at | 13 | Hs.110776 | 2.94 | STATI2 | STAT induced STAT inhibitor-2 |
| 14 | 210093_s_at | 14 | Hs.57904 | 1.52 | MAGOH | mago-nashi homolog, proliferation- |
| | | | | | | associated (Drosophila) |
| 15 | 209392_at | 15 | Hs.174185 | 2.64 | ENPP2 | ectonucleotide |
| | | | | | | pyrophosphatase/phosphodiesterase |
| | | | | | | 2 (autotaxin) |
| 16 | 203372_s_at | 16 | Hs.110776 | 2.44 | STATI2 | STAT induced STAT inhibitor-2 |
| 17 | 212813_at | 17 | Hs.334703 | 1.48 | FLJ14529 | hypothetical protein FLJ14529 |
| 18 | 204326_x_at | 18 | Hs.199263 | 1.78 | MT1L, | metallothionein 1L, metallothionein |
| | | | | | MT1X, | 1X, serine threonine kinase 39 |
| | | | | | STK39 | (STE20/SPS1 homolog, yeast) |
| 19 | 203177_x_at | 19 | Hs.75133 | 1.39 | TFAM | transcription factor A, mitochondrial |
| 20 | 212173_at | 20 | Hs.171811 | 1.61 | AK2 | adenylate kinase 2 |
| 21 | 204438_at | 21 | Hs.75182 | 2.26 | MRC1 | mannose receptor, C type 1 |
| 22 | 212185_x_at | 22 | Hs.118786 | 1.89 | MT2A | metallothionein 2A |
| 23 | 214281_s_at | 23 | Hs.48297 | 1.56 | ZNF363 | zinc finger protein 363 |
| 24 | 217975_at | 24 | Hs.15984 | 1.65 | LOC51186 | pp21 homolog |
| 25 | 220974_x_at | 25 | Hs.283844 | 2.10 | BA108L7.2 | similar to rat tricarboxylate carrier- |
| | | | | | | like protein |
| 26 | 218807_at | 26 | Hs.267659 | 1.52 | VAV3 | vav 3 oncogene |
| 27 | 201263_at | 27 | Hs.84131 | 1.43 | TARS | threonyl-tRNA synthetase |
| 28 | 217165_x_at | 28 | n/a | 2.02 | | unknown |
| 29 | 201013_s_at | 29 | Hs.117950 | 1.54 | PAICS | phosphoribosylaminoimidazole |
| | | | | | | carboxylase, |
| | | | | | | phosphoribosylaminoimidazole |
| | | | | | | succinocarboxamide synthetase |
| 30 | 208835_s_at | 30 | Hs.3688 | 1.46 | LUC7A | cisplatin resistance-associated |
| | | | | | | overexpressed protein |
| 31 | 218049_s_at | 31 | Hs.333823 | 1.48 | MRPL13 | mitochondrial ribosomal protein L13 |
| 32 | 217824_at | 32 | Hs.184325 | 1.25 | NCUBE1 | non-canonical ubquitin conjugating |
| | | | | | | enzyme 1 |
| 33 | 220059_at | 33 | Hs.121128 | 1.56 | BRDG1 | BCR downstream signaling 1 |
| 34 | 202942_at | 34 | Hs.74047 | 1.78 | ETFB | electron-transfer-flavoprotein, beta |
| | | | | | | polypeptide |
| 35 | 200986_at | 35 | Hs.151242 | 1.38 | SERPING1 | serine (or cysteine) proteinase |
| | | | | | | inhibitor, clade G (C1 inhibitor), |
| | | | | | | member 1, (angioedema, hereditary) |
| 36 | 221652_s_at | 36 | Hs.22595 | 1.33 | FLJ10637 | hypothetical protein FLJ10637 |
| 37 | 211456_x_at | 37 | Hs.367850 | 1.75 | | unknown |
| 38 | 201487_at | 38 | Hs.10029 | 1.74 | CTSC | cathepsin C |
| 39 | 220668_s_at | 39 | Hs.251673 | 2.00 | DNMT3B | DNA (cytosine-5-)-methyltransferase |
| | | | | | | 3 beta |
| 40 | 215088_s_at | 40 | Hs.355964 | 1.43 | SDHC | succinate dehydrogenase complex, |
| | | | | | | subunit C, integral membrane |
| | | | | | | protein, 15 kD |
| 41 | 205394_at | 41 | Hs.20295 | 1.07 | CHEK1 | CHK1 checkpoint homolog (S. pombe) |
| 42 | 218364_at | 42 | Hs.57672 | 1.38 | LRRFIP2 | leucine rich repeat (in FLII) |
| | | | | | | interacting protein 2 |
| 43 | 222010_at | 43 | Hs.4112 | 1.27 | TCP1 | t-complex 1 |
| 44 | 218286_s_at | 44 | Hs.14084 | 1.47 | RNF7 | ring finger protein 7 |
| 45 | 208955_at | 45 | Hs.367676 | 1.21 | DUT | dUTP pyrophosphatase |
| 46 | 210715_s_at | 46 | Hs.31439 | 2.04 | SPINT2 | serine protease inhibitor, Kunitz |
| | | | | | | type, 2 |
| 47 | 218055_s_at | 47 | Hs.16470 | 1.21 | FLJ10904 | hypothetical protein FLJ10904 |
| 48 | 202946_s_at | 48 | Hs.7935 | 2.65 | BTBD3 | BTB (POZ) domain containing 3 |
| 49 | 201397_at | 49 | Hs.3343 | 1.14 | PHGDH | phosphoglycerate dehydrogenase |
| 50 | 204050_s_at | 50 | Hs.104143 | 1.54 | CLTA | clathrin, light polypeptide (Lca) |
| 51 | 201425_at | 51 | Hs.195432 | 2.29 | ALDH2 | aldehyde dehydrogenase 2 family |
| | | | | | | (mitochondrial) |
| 52 | 204484_at | 52 | Hs.132463 | 1.58 | PIK3C2B | phosphoinositide-3-kinase, class 2, |
| | | | | | | beta polypeptide |
| 53 | 212072_s_at | 53 | n/a | 1.40 | | unknown |
| 54 | 215905_s_at | 54 | Hs.10290 | 1.34 | HPRP8BP | U5 snRNP-specific 40 kDa protein |
| | | | | | | (hPrp8-binding) |
| 55 | 201827_at | 55 | Hs.250581 | 1.47 | SMARCD2 | SWI/SNF related, matrix associated, |
| | | | | | | actin dependent regulator of |
| | | | | | | chromatin, subfamily d, member 2 |
| 56 | 211031_s_at | 56 | Hs.104717 | 1.21 | CYLN2 | cytoplasmic linker 2 |
| 57 | 217963_s_at | 57 | Hs.169248 | 2.49 | HCS, | cytochrome c, nerve growth factor |
| | | | | | NGFRAP1 | receptor (TNFRSF16) associated |
| | | | | | | protein 1 |
| 58 | 208029_s_at | 58 | Hs.296398 | 6.87 | LC27 | putative integral membrane |
| | | | | | | transporter |
| 59 | 202184_s_at | 59 | Hs.12457 | 1.37 | NUP133 | nucleoporin 133 kD |
| 60 | 214228_x_at | 60 | Hs.129780 | 2.36 | TNFRSF4 | tumor necrosis factor receptor |
| | | | | | | superfamily, member 4 |
| 61 | 214113_s_at | 61 | Hs.10283 | 1.42 | RBM8A | RNA binding motif protein 8A |
| 62 | 217957_at | 62 | Hs.279818 | 1.26 | AF093680 | similar to mouse Glt3 or D. malanogaster |
| | | | | | | transcription factor IIB |
| 63 | 218622_at | 63 | Hs.5152 | 1.30 | MGC5585 | hypothetical protein MGC5585 |
| 64 | 208937_s_at | 64 | Hs.75424 | 1.20 | ID1 | inhibitor of DNA binding 1, dominant |
| | | | | | | negative helix-loop-helix protein |
| 65 | 213258_at | 65 | Hs.288582 | 1.94 | | unknown |
| 66 | 206480_at | 66 | Hs.456 | 2.05 | LTC4S | leukotriene C4 synthase |
| 67 | 203405_at | 67 | Hs.5198 | 1.47 | DSCR2 | Down syndrome critical region gene 2 |
| 68 | 202430_s_at | 68 | Hs.198282 | 1.50 | PLSCR1 | phospholipid scramblase 1 |
| 69 | 218289_s_at | 69 | Hs.170737 | 1.23 | FLJ23251 | hypothetical protein FLJ23251 |
| 70 | 209757_s_at | 70 | Hs.25960 | 1.36 | MYCN | v-myc myelocytomatosis viral related |
| | | | | | | oncogene, neuroblastoma derived |
| | | | | | | (avian) |
| 71 | 210298_x_at | 71 | Hs.239069 | 1.14 | FHL1 | four and a half LIM domains 1 |
| 72 | 217814_at | 72 | Hs.8207 | 1.50 | GK001 | GK001 protein |
| 73 | 201690_s_at | 73 | Hs.2384 | 1.63 | TPD52 | tumor protein D52 |
| 74 | 201923_at | 74 | Hs.83383 | 1.18 | PRDX4 | peroxiredoxin 4 |
| 75 | 210665_at | 75 | Hs.170279 | 1.81 | TFPI | tissue factor pathway inhibitor |
| | | | | | | (lipoprotein-associated coagulation |
| | | | | | | inhibitor) |
| 76 | 212859_x_at | 76 | Hs.74170 | 1.47 | | unknown |
| 77 | 221504_s_at | 77 | Hs.19575 | 1.60 | ATP6V1H | ATPase, H+ transporting, lysosomal |
| | | | | | | 50/57 kD V1 subunit H |

TABLE 2
Genes Having Higher Baseline Peripheral Blood Expression
Levels in Responding Patients

| | | | | Fold | | |
|---|---|---|---|---|---|---|
| Gene | | SEQ | | Change | | |
| No. | Qualifier | ID NO: | Unigene No. | (R/NR) | Gene Symbol | Gene Name |
| 78 | 203739_at | 78 | Hs.155040 | 1.50 | ZNF217 | zinc finger protein 217 |
| 79 | 219593_at | 79 | Hs.237856 | 3.57 | PHT2 | peptide transporter 3 |
| 80 | 204132_s_at | 80 | Hs.14845 | 1.93 | FOXO3A | forkhead box O3A |
| 81 | 210972_x_at | 81 | Hs.74647 | 3.89 | TRA@ | T cell receptor alpha locus |
| 82 | 205220_at | 82 | Hs.137555 | 3.11 | HM74 | putative chemokine receptor; |
| | | | | | | GTP-binding protein |
| 83 | 201235_s_at | 83 | Hs.75462 | 2.35 | BTG2 | BTG family, member 2 |
| 84 | 209535_s_at | 84 | Hs.301946 | 1.69 | LBC | lymphoid blast crisis |
| | | | | | | oncogene |
| 85 | 209671_x_at | 85 | Hs.74647 | 3.95 | TRA@ | T cell receptor alpha locus |
| 86 | 203945_at | 86 | Hs.172851 | 1.62 | ARG2 | arginase, type II |
| 87 | 219434_at | 87 | Hs.283022 | 2.61 | TREM1 | triggering receptor expressed |
| | | | | | | on myeloid cells 1 |
| 88 | 221558_s_at | 88 | Hs.44865 | 2.63 | LEF1 | lymphoid enhancer-binding |
| | | | | | | factor 1 |
| 89 | 214056_at | 89 | Hs.86386 | 1.91 | MCL1 | myeloid cell leukemia |
| | | | | | | sequence 1 (BCL2-related) |
| 90 | 203907_s_at | 90 | Hs.4764 | 2.63 | KIAA0763 | KIAA0763 gene product |
| 91 | 217022_s_at | 91 | Hs.293441 | 2.00 | | unknown |
| 92 | 203413_at | 92 | Hs.79389 | 2.04 | NELL2 | NEL-like 2 (chicken) |
| 93 | 212074_at | 93 | Hs.7531 | 1.62 | KIAA0810 | KIAA0810 protein |
| 94 | 220987_s_at | 94 | Hs.172012 | 1.62 | DKFZP434J037 | hypothetical protein |
| | | | | | | DKFZp434J037 |
| 95 | 212658_at | 95 | Hs.79299 | 1.66 | LHFPL2 | lipoma HMGIC fusion |
| | | | | | | partner-like 2 |
| 96 | 214467_at | 96 | Hs.131924 | 2.14 | GPR65 | G protein-coupled receptor |
| | | | | | | 65 |
| 97 | AFFX-DapX- | 97 | n/a | 1.34 | | unknown |
| | 3_at | | | | | |
| 98 | 212812_at | 98 | Hs.288232 | 2.39 | | unknown |
| 99 | 212579_at | 99 | Hs.8118 | 1.83 | KIAA0650 | KIAA0650 protein |
| 100 | 206133_at | 100 | Hs.139262 | 1.86 | HSXIAPAF1 | XIAP associated factor-1 |
| 101 | 213797_at | 101 | Hs.17518 | 1.80 | cig5 | vipirin |
| 102 | 213958_at | 102 | Hs.81226 | 1.55 | CD6 | CD6 antigen |
| 103 | 204638_at | 103 | Hs.1211 | 1.66 | ACP5 | acid phosphatase 5, tartrate |
| | | | | | | resistant |
| 104 | 202481_at | 104 | Hs.17144 | 1.69 | SDR1 | short-chain |
| | | | | | | dehydrogenase/reductase 1 |
| 105 | 204961_s_at | 105 | Hs.1583 | 1.95 | NCF1 | neutrophil cytosolic factor 1 |
| | | | | | | (47 kD, chronic |
| | | | | | | granulomatous disease, |
| | | | | | | autosomal 1) |
| 106 | 209448_at | 106 | Hs.90753 | 1.36 | HTATIP2 | HIV-1 Tat interactive protein |
| | | | | | | 2, 30 kD |
| 107 | 203290_at | 107 | Hs.198253 | 2.81 | HLA-DQA1 | major histocompatibility |
| | | | | | | complex, class II, DQ alpha 1 |
| 108 | 215275_at | 108 | n/a | 2.10 | | unknown |
| 109 | 221060_s_at | 109 | Hs.159239 | 1.60 | TLR4 | toll-like receptor 4 |
| 110 | 212573_at | 110 | Hs.167115 | 1.44 | KIAA0830 | KIAA0830 protein |
| 111 | 213193_x_at | 111 | Hs.303157 | 1.89 | TRB@ | T cell receptor beta locus |
| 112 | 205568_at | 112 | Hs.104624 | 3.54 | AQP9 | aquaporin 9 |
| 113 | 209281_s_at | 113 | Hs.78546 | 1.65 | ATP2B1 | ATPase, Ca++ transporting, |
| | | | | | | plasma membrane 1 |
| 114 | 204912_at | 114 | Hs.327 | 2.17 | IL10RA | interleukin 10 receptor, alpha |
| 115 | 219099_at | 115 | Hs.24792 | 1.39 | C12orf5 | chromosome 12 open |
| | | | | | | reading frame 5 |
| 116 | 211796_s_at | 116 | Hs.303157 | 2.06 | TRB@ | T cell receptor beta locus |
| 117 | 221724_s_at | 117 | Hs.115515 | 1.84 | CLECSF6 | C-type (calcium dependent, |
| | | | | | | carbohydrate-recognition |
| | | | | | | domain) lectin, superfamily |
| | | | | | | member 6 |
| 118 | 219607_s_at | 118 | Hs.325960 | 1.56 | MS4A4A | membrane-spanning 4- |
| | | | | | | domains, subfamily A, |
| | | | | | | member 4 |
| 119 | 218802_at | 119 | Hs.234149 | 1.91 | FLJ20647 | hypothetical protein |
| | | | | | | FLJ20647 |
| 120 | 221671_x_at | 120 | Hs.156110 | 2.19 | IGKC | immunoglobulin kappa |
| | | | | | | constant |
| 121 | 215121_x_at | 121 | Hs.8997 | 2.56 | HSPA1A, | heat shock 70 kD protein 1A, |
| | | | | | IGL@ | immunoglobulin lambda locus |
| 122 | 202147_s_at | 122 | Hs.7879 | 1.96 | IFRD1 | linterferon-related |
| | | | | | | developmental regulator 1 |
| 123 | 201739_at | 123 | Hs.296323 | 3.73 | SGK | serum/glucocorticoid |
| | | | | | | regulated kinase |
| 124 | 208014_x_at | 124 | Hs.129735 | 1.65 | AD7C-NTP | neuronal thread protein |
| 125 | 211339_s_at | 125 | Hs.211576 | 2.14 | ITK | IL2-inducible T-cell kinase |
| 126 | 211649_x_at | 126 | n/a | 1.84 | | unknown |
| 127 | 202643_s_at | 127 | Hs.211600 | 1.32 | TNFAIP3 | tumor necrosis factor, alpha- |
| | | | | | | induced protein 3 |
| 128 | 218829_s_at | 128 | n/a | 1.95 | | unknown |
| 129 | 204072_s_at | 129 | Hs.181304 | 1.33 | 13CDNA73 | hypothetical protein CG003 |
| 130 | 211824_x_at | 130 | Hs.104305 | 1.38 | DEFCAP | death effector filament- |
| | | | | | | forming Ced-4-like apoptosis |
| | | | | | | protein |
| 131 | 209824_s_at | 131 | Hs.74515 | 2.15 | ARNTL | aryl hydrocarbon receptor |
| | | | | | | nuclear translocator-like |
| 132 | 213539_at | 132 | Hs.95327 | 1.81 | CD3D | CD3D antigen, delta |
| | | | | | | polypeptide (TiT3 complex) |
| 133 | 217143_s_at | 133 | Hs.2014 | 2.01 | TRD@ | T cell receptor delta locus |
| 134 | 204479_at | 134 | Hs.95821 | 1.39 | OSTF1 | osteoclast stimulating factor 1 |
| 135 | 200628_s_at | 135 | Hs.374466 | 1.49 | WARS | tryptophanyl-tRNA |
| | | | | | | synthetase |
| 136 | 201694_s_at | 136 | Hs.326035 | 2.77 | EGR1 | early growth response 1 |
| 137 | 205821_at | 137 | Hs.74085 | 1.51 | D12S2489E | DNA segment on |
| | | | | | | chromosome 12 (unique) |
| | | | | | | 2489 expressed sequence |
| 138 | 209138_x_at | 138 | Hs.181125 | 1.85 | IGLJ3 | immunoglobulin lambda |
| | | | | | | joining 3 |
| 139 | 215242_at | 139 | Hs.97375 | 1.40 | | unknown |
| 140 | 211656_x_at | 140 | Hs.73931 | 1.87 | HLA-DQB1 | major histocompatibility |
| | | | | | | complex, class II, DQ beta 1 |
| 141 | 222221_x_at | 141 | Hs.155119 | 1.45 | EHD1 | EH-domain containing 1 |
| 142 | 208488_s_at | 142 | Hs.193716 | 1.70 | CR1 | complement component |
| | | | | | | (3b/4b) receptor 1, including |
| | | | | | | Knops blood group system |
| 143 | 202437_s_at | 143 | Hs.154654 | 1.66 | CYP1B1 | cytochrome P450, subfamily I |
| | | | | | | (dioxin-inducible), |
| | | | | | | polypeptide 1 (glaucoma 3, |
| | | | | | | primary infantile) |
| 144 | 212286_at | 144 | Hs.27973 | 1.45 | KIAA0874 | KIAA0874 protein |
| 145 | 204959_at | 145 | Hs.153837 | 1.24 | MNDA | myeloid cell nuclear |
| | | | | | | differentiation antigen |
| 146 | 221651_x_at | 146 | Hs.156110 | 2.15 | IGKC | immunoglobulin kappa |
| | | | | | | constant |
| 147 | 201236_s_at | 147 | Hs.75462 | 1.81 | BTG2 | BTG family, member 2 |
| 148 | 211005_at | 148 | Hs.83496 | 1.52 | LAT | linker for activation of T cells |
| 149 | 208078_s_at | 149 | Hs.232068 | 2.27 | TCF8 | transcription factor 8 |
| | | | | | | (represses interleukin 2 |
| | | | | | | expression) |
| 150 | 210018_x_at | 150 | Hs.180566 | 1.61 | MALT1 | mucosa associated lymphoid |
| | | | | | | tissue lymphoma |
| | | | | | | translocation gene 1 |
| 151 | 209273_s_at | 151 | Hs.177776 | 1.56 | MGC4276 | hypothetical protein |
| | | | | | | MGC4276 similar to CG8198 |
| 152 | 213624_at | 152 | Hs.42945 | 1.84 | ASM3A | acid sphingomyelinase-like |
| | | | | | | phosphodiesterase |
| 153 | 208075_s_at | 153 | Hs.251526 | 1.77 | SCYA7 | small inducible cytokine A7 |
| | | | | | | (monocyte chemotactic |
| | | | | | | protein 3) |
| 154 | 212154_at | 154 | Hs.1501 | 1.90 | SDC2 | syndecan 2 (heparan sulfate |
| | | | | | | proteoglycan 1, cell surface- |
| | | | | | | associated, fibroglycan) |

TABLE 3
Top 50 transcripts significantly elevated (p < 0.05)
at baseline in non-responder patient PBMCs

| Affymetrix | SEQ | | | | Fold Diff | p-value |
|---|---|---|---|---|---|---|
| ID | ID NO: | Name | Cyto Band | Unigene ID | (NR/R) | (unequal) |
| 209392_at | 15 | ectonucleotide | 8q24.1 | Hs.174185 | 2.64 | 4.91E−02 |
| | | pyrophosphatase/phosphodiesterase | | | | |
| | | 2 (autotaxin) | | | | |
| 220974_x_at | 25 | similar to rat tricarboxylate | 10q24.31 | Hs.283844 | 2.10 | 1.71E−02 |
| | | carrier-like protein | | | | |
| 206480_at | 66 | leukotriene C4 synthase | 5q35 | Hs.456 | 2.05 | 4.90E−02 |
| 208581_x_at | 1 | metallothionein 1L, | 16q13 | Hs.278462 | 2.04 | 3.13E−02 |
| | | metallothionein 1X | | | | |
| 217165_x_at | 28 | unknown | n/a | n/a | 2.02 | 3.54E−02 |
| 220668_s_at | 39 | DNA (cytosine-5-)- | 20q11.2 | Hs.251673 | 2.00 | 4.00E−02 |
| | | methyltransferase 3 beta | | | | |
| 212185_x_at | 22 | metallothionein 2A | 16q13 | Hs.118786 | 1.89 | 2.55E−02 |
| 209407_s_at | 4 | deformed epidermal | 11p15.5 | Hs.6574 | 1.88 | 2.01E−02 |
| | | autoregulatory factor 1 | | | | |
| | | (Drosophila) | | | | |
| 37384_at | 819 | KIAA0015 gene product | 22q11.22 | Hs.278441 | 1.87 | 4.11E−02 |
| 203725_at | 5 | growth arrest and DNA- | 1p31.2-p31.1 | Hs.80409 | 1.84 | 4.70E−02 |
| | | damage-inducible, alpha | | | | |
| 202942_at | 34 | electron-transfer-flavoprotein, | 19q13.3 | Hs.74047 | 1.78 | 4.69E−02 |
| | | beta polypeptide | | | | |
| 216336_x_at | 3 | unknown | n/a | n/a | 1.73 | 4.92E−02 |
| 212235_at | 592 | KIAA0620 protein | 3q22.1 | Hs.301685 | 1.69 | 4.00E−02 |
| 203089_s_at | 284 | protease, serine, 25 | 2p12 | Hs.115721 | 1.67 | 2.23E−02 |
| 221504_s_at | 77 | ATPase, H+ transporting, | 8p22-q22.3 | Hs.19575 | 1.60 | 4.82E−02 |
| | | lysosomal 50/57 kD V1 subunit H | | | | |
| 220942_x_at | 790 | hypothetical protein, estradiol- | 3q21.1 | Hs.5243 | 1.57 | 2.85E−02 |
| | | induced | | | | |
| 214281_s_at | 23 | zinc finger protein 363 | 4q21.1 | Hs.48297 | 1.56 | 2.43E−02 |
| 203091_at | 285 | far upstream element (FUSE) | 1p31.1 | Hs.118962 | 1.56 | 3.28E−02 |
| | | binding protein 1 | | | | |
| 204050_s_at | 50 | clathrin, light polypeptide (Lca) | 9p13 | Hs.104143 | 1.54 | 4.99E−02 |
| 210093_s_at | 14 | mago-nashi homolog, | 1p34-p33 | Hs.57904 | 1.52 | 2.43E−04 |
| | | proliferation-associated | | | | |
| | | (Drosophila) | | | | |
| 217226_s_at | 689 | paired mesoderm homeo box | 10q24.31, | Hs.155606 | 1.52 | 8.44E−03 |
| | | 1, similar to rat tricarboxylate | 1q24 | | | |
| | | carrier-like protein | | | | |
| 218807_at | 26 | vav 3 oncogene | 1p13.2 | Hs.267659 | 1.52 | 2.11E−02 |
| 200824_at | 172 | glutathione S-transferase pi | 11q13 | Hs.226795 | 1.51 | 2.96E−02 |
| 221923_s_at | 805 | nucleophosmin (nucleolar | 5q35 | Hs.9614 | 1.51 | 3.95E−03 |
| | | phosphoprotein B23, numatrin) | | | | |
| 202854_at | 269 | hypoxanthine | Xq26.1 | Hs.82314 | 1.51 | 1.32E−02 |
| | | phosphoribosyltransferase 1 | | | | |
| | | (Lesch-Nyhan syndrome) | | | | |
| 201241_at | 197 | DEAD/H (Asp-Glu-Ala- | 2p24 | Hs.78580 | 1.51 | 3.98E−02 |
| | | Asp/His) box polypeptide 1 | | | | |
| 203720_s_at | 305 | excision repair cross- | 19q13.2-q13.3 | Hs.59544 | 1.49 | 2.55E−02 |
| | | complementing rodent repair | | | | |
| | | deficiency, complementation | | | | |
| | | group 1 (includes overlapping | | | | |
| | | antisense sequence) | | | | |
| 211941_s_at | 578 | prostatic binding protein | 12q24.22 | Hs.80423 | 1.48 | 5.88E−03 |
| 218049_s_at | 31 | mitochondrial ribosomal | 8q22.1-q22.3 | Hs.333823 | 1.48 | 4.24E−02 |
| | | protein L13 | | | | |
| 218795_at | 737 | LPAP for lysophosphatidic | 1q21 | Hs.15871 | 1.48 | 4.03E−02 |
| | | acid phosphatase | | | | |
| 212749_s_at | 606 | zinc finger protein 363 | 4q21.1 | Hs.48297 | 1.47 | 2.06E−02 |
| 200960_x_at | 179 | clathrin, light polypeptide (Lca) | 9p13 | Hs.104143 | 1.46 | 4.43E−02 |
| 201577_at | 221 | non-metastatic cells 1, protein | 17q21.3 | Hs.118638 | 1.46 | 3.31E−02 |
| | | (NM23A) expressed in | | | | |
| 205711_x_at | 412 | ATP synthase, H+ | 10q22-q23, | Hs.155433 | 1.44 | 2.59E−02 |
| | | transporting, mitochondrial F1 | 8p22-p21.3 | | | |
| | | complex, gamma polypeptide | | | | |
| | | 1, CCR4-NOT transcription | | | | |
| | | complex, subunit 7 | | | | |
| 213366_x_at | 625 | ATP synthase, H+ | 10q22-q23, | Hs.155433 | 1.44 | 4.59E−02 |
| | | transporting, mitochondrial F1 | 8p22-p21.3 | | | |
| | | complex, gamma polypeptide | | | | |
| | | 1, CCR4-NOT transcription | | | | |
| | | complex, subunit 7 | | | | |
| 217942_at | 702 | mitochondrial ribosomal | 12p11 | Hs.10724 | 1.44 | 3.24E−02 |
| | | protein S35 | | | | |
| 208713_at | 468 | E1B-55 kDa-associated protein 5 | 19q13.31 | Hs.155218 | 1.44 | 1.66E−02 |
| 201765_s_at | 225 | hexosaminidase A (alpha | 15q23-q24 | Hs.119403 | 1.43 | 4.74E−02 |
| | | polypeptide) | | | | |
| 216295_s_at | 679 | clathrin, light polypeptide (Lca) | 9p13 | Hs.348345 | 1.43 | 4.32E−02 |
| 202929_s_at | 275 | D-dopachrome tautomerase | 22q11.23 | Hs.180015 | 1.43 | 4.87E−02 |
| 217871_s_at | 700 | macrophage migration | 22q11.23 | Hs.73798 | 1.43 | 3.36E−02 |
| | | inhibitory factor (glycosylation- | | | | |
| | | inhibiting factor) | | | | |
| 218078_s_at | 711 | zinc finger, DHHC domain | 3p21.32 | Hs.14896 | 1.42 | 1.63E−02 |
| | | containing 3 | | | | |
| 208870_x_at | 474 | ATP synthase, H+ | 10q22-q23, | Hs.155433 | 1.42 | 1.95E−02 |
| | | transporting, mitochondrial F1 | 8p22-p21.3 | | | |
| | | complex, gamma polypeptide | | | | |
| | | 1, CCR4-NOT transcription | | | | |
| | | complex, subunit 7 | | | | |
| 200822_x_at | 171 | triosephosphate isomerase 1 | 12p13 | Hs.83848 | 1.42 | 4.53E−02 |
| 203103_s_at | 286 | nuclear matrix protein | 11q12.2 | Hs.173980 | 1.41 | 3.70E−02 |
| | | NMP200 related to splicing | | | | |
| | | factor PRP19 | | | | |
| 213507_s_at | 628 | karyopherin (importin) beta 1 | 17q21 | Hs.180446 | 1.41 | 1.07E−02 |
| 201231_s_at | 195 | enolase 1, (alpha) | 1p36.3-p36.2 | Hs.254105 | 1.40 | 2.89E−02 |
| 204905_s_at | 376 | eukaryotic translation | 6p24.3-p25.1 | Hs.298581 | 1.39 | 3.32E−02 |
| | | elongation factor 1 epsilon 1 | | | | |
| 203177_x_at | 19 | transcription factor A, | 10q21 | Hs.75133 | 1.39 | 2.82E−02 |
| | | mitochondrial | | | | |
| 218154_at | 714 | hypothetical protein FLJ12150 | 8q24.3 | Hs.118983 | 1.39 | 4.30E−02 |

TABLE 4
Top 50 transcripts significantly elevated (p < 0.05) at
baseline in responder patient PBMCs

| Affymetrix | SEQ ID | | | | Fold Diff | p-value |
|---|---|---|---|---|---|---|
| ID | NO: | Name | Cyto Band | Unigene ID | (R/NR) | (unequal) |
| 218559_s_at | 727 | v-maf musculoaponeurotic | 20q11.2-q13.1 | Hs.169487 | 7.33 | 1.30E−02 |
| | | fibrosarcoma oncogene | | | | |
| | | homolog B (avian) | | | | |
| 209728_at | 509 | major histocompatibility | 6p21.3 | Hs.318720 | 6.49 | 5.81E−03 |
| | | complex, class II, DR beta 4 | | | | |
| 204614_at | 356 | serine (or cysteine) proteinase | 18q21.3 | Hs.75716 | 4.11 | 4.20E−02 |
| | | inhibitor, clade B (ovalbumin), | | | | |
| | | member 2 | | | | |
| 209671_x_at | 85 | T cell receptor alpha locus | 14q11.2 | Hs.74647 | 3.95 | 8.98E−03 |
| 210972_x_at | 81 | T cell receptor alpha locus | 14q11.2 | Hs.74647 | 3.89 | 6.39E−03 |
| 201739_at | 123 | serum/glucocorticoid | 6q23 | Hs.296323 | 3.73 | 5.87E−04 |
| | | regulated kinase | | | | |
| 219593_at | 79 | peptide transporter 3 | 11q13.1 | Hs.237856 | 3.57 | 7.04E−04 |
| 205568_at | 112 | aquaporin 9 | 15q22.1-22.2 | Hs.104624 | 3.54 | 8.87E−04 |
| 204885_s_at | 372 | mesothelin | 16p13.12 | Hs.155981 | 3.54 | 2.13E−02 |
| 211571_s_at | 564 | chondroitin sulfate | 5q14.3 | Hs.81800 | 3.45 | 4.23E−02 |
| | | proteoglycan 2 (versican) | | | | |
| 210655_s_at | 545 | forkhead box O3A | 6q21 | Hs.14845 | 3.36 | 5.20E−03 |
| 213338_at | 622 | Ras-induced senescence 1 | 3p21.3 | Hs.35861 | 3.29 | 1.67E−02 |
| 213524_s_at | 630 | putative lymphocyte G0/G1 | 1q32.2-q41 | Hs.95910 | 3.28 | 1.78E−03 |
| | | switch gene | | | | |
| 221602_s_at | 798 | regulator of Fas-induced | 1q31.3 | Hs.58831 | 3.19 | 8.83E−03 |
| | | apoptosis | | | | |
| 205220_at | 82 | putative chemokine receptor; | 12q24.31 | Hs.137555 | 3.11 | 7.86E−04 |
| | | GTP-binding protein | | | | |
| 208450_at | 461 | lectin, galactoside-binding, | 22q13.1 | Hs.113987 | 2.99 | 3.18E−02 |
| | | soluble, 2 (galectin 2) | | | | |
| 205898_at | 416 | chemokine (C—X3—C) | 3p21.3 | Hs.78913 | 2.98 | 2.29E−02 |
| | | receptor 1 | | | | |
| 212099_at | 584 | ras homolog gene family, | 2pter-p12 | Hs.204354 | 2.96 | 3.05E−03 |
| | | member B | | | | |
| 218856_at | 742 | hypothetical protein | 6p12.3, 6p21.1-12.2 | Hs.65403 | 2.90 | 8.84E−03 |
| | | LOC51323, tumor necrosis | | | | |
| | | factor receptor superfamily, | | | | |
| | | member 21 | | | | |
| 220088_at | 775 | complement component 5 | 19q13.3-q13.4 | Hs.2161 | 2.86 | 6.44E−03 |
| | | receptor 1 (C5a ligand) | | | | |
| 221698_s_at | 799 | C-type (calcium dependent, | 12p13.2-p12.3 | Hs.161786 | 2.83 | 1.85E−03 |
| | | carbohydrate-recognition | | | | |
| | | domain) lectin, superfamily | | | | |
| | | member 12 | | | | |
| 201743_at | 224 | CD14 antigen | 5q31.1 | Hs.75627 | 2.83 | 2.71E−02 |
| 212657_s_at | 604 | interleukin 1 receptor | 2q14.2 | Hs.81134 | 2.83 | 4.41E−03 |
| | | antagonist | | | | |
| 203290_at | 107 | major histocompatibility | 6p21.3 | Hs.198253 | 2.81 | 2.06E−02 |
| | | complex, class II, DQ alpha 1 | | | | |
| 204588_s_at | 354 | solute carrier family 7 (cationic | 14q11.2 | Hs.194693 | 2.81 | 3.88E−03 |
| | | amino acid transporter, y+ | | | | |
| | | system), member 7 | | | | |
| 211506_s_at | 561 | interleukin 8 | 4q13-q21 | Hs.624 | 2.80 | 1.47E−03 |
| 201694_s_at | 136 | early growth response 1 | 5q31.1 | Hs.326035 | 2.77 | 1.04E−03 |
| 204890_s_at | 373 | lymphocyte-specific protein | 1p34.3 | Hs.1765 | 2.64 | 2.12E−02 |
| | | tyrosine kinase | | | | |
| 221558_s_at | 88 | lymphoid enhancer-binding | 4q23-q25 | Hs.44865 | 2.63 | 1.82E−02 |
| | | factor 1 | | | | |
| 203907_s_at | 90 | KIAA0763 gene product | 3p25.1 | Hs.4764 | 2.63 | 1.45E−03 |
| 203066_at | 282 | B cell RAG associated protein | 10q26 | Hs.6079 | 2.61 | 1.90E−03 |
| 219434_at | 87 | triggering receptor expressed | 6p21.1 | Hs.283022 | 2.61 | 2.06E−02 |
| | | on myeloid cells 1 | | | | |
| 216191_s_at | 677 | T cell receptor delta locus | 14q11.2 | Hs.2014 | 2.59 | 1.80E−02 |
| 205114_s_at | 382 | small inducible cytokine A3 | 17q11-q21 | Hs.73817 | 2.57 | 3.76E−02 |
| 215223_s_at | 668 | superoxide dismutase 2, | 6q25.3 | Hs.372783 | 2.57 | 1.30E−03 |
| | | mitochondrial | | | | |
| 216491_x_at | 682 | unknown | n/a | n/a | 2.55 | 4.12E−02 |
| 217739_s_at | 695 | pre-B-cell colony-enhancing | 7q11.23 | Hs.239138 | 2.53 | 1.04E−03 |
| | | factor | | | | |
| 201631_s_at | 223 | immediate early response 3 | 6p21.3 | Hs.76095 | 2.47 | 2.21E−02 |
| 202086_at | 238 | myxovirus (influenza virus) | 21q22.3 | Hs.76391 | 2.47 | 1.04E−03 |
| | | resistance 1, interferon- | | | | |
| | | inducible protein p78 (mouse) | | | | |
| 204141_at | 331 | tubulin, beta polypeptide | 6p21.3 | Hs.336780 | 2.46 | 3.35E−02 |
| 209670_at | 507 | T cell receptor alpha locus | 14q11.2 | Hs.74647 | 2.46 | 3.71E−02 |
| 219528_s_at | 762 | B-cell CLL/lymphoma 11B | 14q32.31-q32.32 | Hs.57987 | 2.45 | 3.11E−02 |
| | | (zinc finger protein) | | | | |
| 206150_at | 426 | tumor necrosis factor receptor | 12p13 | Hs.180841 | 2.44 | 1.94E−02 |
| | | superfamily, member 7 | | | | |
| 201506_at | 213 | transforming growth factor, | 5q31 | Hs.118787 | 2.42 | 4.20E−02 |
| | | beta-induced, 68 kD | | | | |
| 203939_at | 314 | 5′-nucleotidase, ecto (CD73) | 6q14-q21 | Hs.153952 | 2.42 | 1.91E−02 |
| 205419_at | 396 | Epstein-Barr virus induced | 13q32.3 | Hs.784 | 2.39 | 1.56E−03 |
| | | gene 2 (lymphocyte-specific G | | | | |
| | | protein-coupled receptor) | | | | |
| 212812_at | 98 | unknown | n/a | Hs.288232 | 2.39 | 1.11E−04 |
| 217378_x_at | 692 | unknown | n/a | n/a | 2.38 | 2.11E−02 |
| 211135_x_at | 555 | leukocyte immunoglobulin-like | 19q13.4 | Hs.105928 | 2.37 | 1.57E−02 |
| | | receptor, subfamily B (with TM | | | | |
| | | and ITIM domains), member 3 | | | | |
| 204006_s_at | 318 | Fc fragment of IgG, low affinity | 1q23 | Hs.372679 | 2.36 | 4.30E−02 |
| | | IIIa, receptor for (CD16), Fc | | | | |
| | | fragment of IgG, low affinity | | | | |
| | | IIIb, receptor for (CD16) | | | | |

Genes Associated with the Onset of Veno-Occlusive Disease

[0087] Veno-occlusive disease (VOD) is one of the most serious complications following hematopoietic stem cell transplantation and is associated with a very high mortality in its severe form. Comparison of pretreatment PBMC profiles from the leukemia patients who experienced VOD with the PBMC profiles from the patients who did not experience VOD identifies significant transcripts that appear to be correlated with this serious adverse event prior to therapy.

[0088] To identify transcripts with significant differences in expression at baseline between the patients who experienced VOD and the non-VOD patients, average fold differences between VOD and non-VOD patient profiles were calculated by dividing the mean level of expression in the baseline VOD profiles by the mean level of expression in the baseline non-VOD profiles. A Student's t-test (two-sample, unequal variance) was used to assess the significance of the difference in expression between the groups.

[0089] Genes whose expression levels are significantly elevated (p<0.05) at baseline in VOD patients are shown in Table 5. Genes whose expression levels are significantly repressed (p<0.05) at baseline in VOD patients are shown in Table 6. Of interest, P-selectin ligand was one of the transcripts most significantly elevated at baseline in patients who experienced VOD. Without wishing to be bound by theory, the elevation in this transcript may be a biomarker indicative of endothelial damage which has been suggested to play a role in transplant-associated diseases such as graft-versus-host disease, sepsis, and VOD.

TABLE 5
Top 50 Transcripts significantly elevated (p < 0.05)
at baseline in VOD patient PBMCs

| | SEQ ID | | | | Fold Diff | p-value |
|---|---|---|---|---|---|---|
| Affymetrix ID | NO:: | Name | Cyto Band | Unigene ID | (VOD/non-VOD) | (unequal) |
| 204020_at | 321 | purine-rich element binding protein A | 5q31 | Hs.29117 | 2.096551724 | 0.025737029 |
| 202742_s_at | 264 | protein kinase, cAMP-dependent, | 1p36.1 | Hs.87773 | 2.031746032 | 0.023084697 |
| | | catalytic, beta | | | | |
| 209879_at | 516 | selectin P ligand | 12q24 | Hs.79283 | 2.02247191 | 0.024750558 |
| AFFX-r2- | 826 | n/a | n/a | n/a | 1.967450271 | 0.00094123 |
| Hs28SrRNA-3_at | | | | | | |
| 217986_s_at | 704 | bromodomain adjacent to zinc finger | 14q12-q13 | Hs.8858 | 1.948186528 | 0.040961702 |
| | | domain, 1A | | | | |
| 202322_s_at | 247 | geranylgeranyl diphosphate | 1q43 | Hs.55498 | 1.806451613 | 0.008621905 |
| | | synthase 1 | | | | |
| AFFX- | 825 | n/a | n/a | n/a | 1.789173789 | 0.007668769 |
| M27830_5_at | | | | | | |
| 219974_x_at | 772 | uncharacterized hypothalamus | 6q23.1 | Hs.239218 | 1.741496599 | 0.026918594 |
| | | protein HCDASE | | | | |
| 201964_at | 231 | KIAA0625 protein | 9q34.3 | Hs.154919 | 1.739130435 | 0.025540988 |
| 202741_at | 263 | n/a | 1p36.1 | Hs.417060 | 1.737931034 | 0.003565502 |
| 203947_at | 315 | cleavage stimulation factor, 3′ pre- | 11p12 | Hs.180034 | 1.723076923 | 0.011499059 |
| | | RNA, subunit 3, 77 kDa | | | | |
| 218642_s_at | 729 | hypothetical protein MGC2217 | 8q11.22 | Hs.323164 | 1.686486486 | 0.010323657 |
| 200860_s_at | 173 | KIAA1007 protein | 16q21 | Hs.279949 | 1.682403433 | 0.018297378 |
| 201027_s_at | 185 | translation initiation factor IF2 | 2p11.1-q11.1 | Hs.158688 | 1.680672269 | 0.032120458 |
| 213361_at | 624 | tudor repeat associator with | 9q22.33 | Hs.283761 | 1.656804734 | 0.027072176 |
| | | PCTAIRE 2 | | | | |
| 220956_s_at | 791 | egl nine homolog 2 (C. elegans) | 19q13.2 | Hs.324277 | 1.653631285 | 0.007996997 |
| 218646_at | 730 | hypothetical protein FLJ20534 | 4q32.3 | Hs.44344 | 1.619047619 | 0.019526095 |
| 200604_s_at | 156 | protein kinase, cAMP-dependent, | 17q23-q24 | Hs.183037 | 1.608938547 | 0.040659084 |
| | | regulatory, type I, alpha (tissue | | | | |
| | | specific extinguisher 1) | | | | |
| 201989_s_at | 233 | cAMP responsive element binding | 12p13 | Hs.13313 | 1.608247423 | 0.042105857 |
| | | protein-like 2 | | | | |
| 217993_s_at | 706 | methionine adenosyltransferase II, | 5q34-q35.1 | Hs.54642 | 1.597964377 | 0.002167131 |
| | | beta | | | | |
| 204613_at | 355 | phospholipase C, gamma 2 | 16q24.1 | Hs.75648 | 1.592039801 | 0.012601371 |
| | | (phosphatidylinositol-specific) | | | | |
| 201142_at | 191 | eukaryotic translation initiation factor | 14q23.3 | Hs.151777 | 1.567010309 | 1.80074E−06 |
| | | 2, subunit 1 alpha, 35 kDa | | | | |
| 219649_at | 765 | dolichyl-P-Glc: Man9GlcNAc2-PP- | 1p31.3 | Hs.80042 | 1.565217391 | 0.021274365 |
| | | dolichylglucosyltransferase | | | | |
| 209907_s_at | 519 | intersectin 2 | 2pter-p25.1 | Hs.166184 | 1.5625 | 0.02410118 |
| 210502_s_at | 540 | peptidylprolyl isomerase E | 1p32 | Hs.379815 | 1.555555556 | 0.000233425 |
| | | (cyclophilin E) | | | | |
| 209903_s_at | 517 | ataxia telangiectasia and Rad3 | 3q22-q24 | Hs.77613 | 1.551515152 | 0.016402019 |
| | | related | | | | |
| 212402_at | 598 | KIAA0853 protein | 13q14.11 | Hs.136102 | 1.543147208 | 1.96044E−06 |
| 202003_s_at | 234 | acetyl-Coenzyme A acyltransferase | 18q21.1 | Hs.356176 | 1.538461538 | 0.031540874 |
| | | 2 (mitochondrial 3-oxoacyl- | | | | |
| | | Coenzyme A thiolase) | | | | |
| 220933_s_at | 789 | hypothetical protein FLJ13409 | 9q21 | Hs.30732 | 1.536723164 | 0.030072848 |
| 208911_s_at | 479 | pyruvate dehydrogenase (lipoamide) | 3p21.1-p14.2 | Hs.979 | 1.531914894 | 0.020768712 |
| | | beta | | | | |
| 212697_at | 605 | n/a | n/a | Hs.432850 | 1.519832985 | 0.022783857 |
| 219940_s_at | 770 | hypothetical protein FLJ11305 | 13q34 | Hs.7049 | 1.514403292 | 0.001555339 |
| 212754_s_at | 607 | KIAA1040 protein | 12q13.13 | Hs.9846 | 1.505882353 | 0.037849628 |
| 207614_s_at | 453 | cullin 1 | 7q34-q35 | Hs.14541 | 1.496402878 | 0.049509373 |
| 209096_at | 483 | ubiquitin-conjugating enzyme E2 | 8q11.1 | Hs.79300 | 1.493975904 | 0.047033925 |
| | | variant 2 | | | | |
| 200802_at | 167 | seryl-tRNA synthetase | 1p13.3-p13.1 | Hs.144063 | 1.488372093 | 0.005291866 |
| 220408_x_at | 779 | transcription factor (p38 interacting | 13q13.1-q13.2 | Hs.376447 | 1.484848485 | 0.035433399 |
| | | protein) | | | | |
| 204780_s_at | 364 | tumor necrosis factor receptor | 10q24.1 | Hs.426662 | 1.476923077 | 0.000371305 |
| | | superfamily, member 6 | | | | |
| 203879_at | 310 | phosphoinositide-3-kinase, catalytic, | 1p36.2 | Hs.162808 | 1.471406491 | 0.035824787 |
| | | delta polypeptide | | | | |
| 201384_s_at | 204 | membrane component, | 17q21.1 | Hs.277721 | 1.46875 | 0.009771907 |
| | | chromosome 17, surface marker 2 | | | | |
| | | (ovarian carcinoma antigen CA125) | | | | |
| 212588_at | 603 | protein tyrosine phosphatase, | 1q31-q32 | Hs.170121 | 1.461700632 | 0.048016891 |
| | | receptor type, C | | | | |
| 219033_at | 751 | hypothetical protein FLJ21308 | 5q11.1 | Hs.406232 | 1.459016393 | 0.02208168 |
| 203073_at | 283 | component of oligomeric golgi | 1q42.13 | Hs.82399 | 1.457489879 | 0.008447959 |
| | | complex 2 | | | | |
| 206332_s_at | 430 | interferon, gamma-inducible protein | 1q22 | Hs.155530 | 1.455696203 | 0.027832428 |
| | | 16 | | | | |
| 202868_s_at | 272 | POP4 (processing of precursor, | 19q13.11 | Hs.82238 | 1.449275362 | 0.021497345 |
| | | S. cerevisiae) homolog | | | | |
| 218249_at | 718 | zinc finger, DHHC domain | 10q26.11 | Hs.22353 | 1.427509294 | 0.001378715 |
| | | containing 6 | | | | |
| 212530_at | 602 | NIMA (never in mitosis gene a)- | 1q31.3 | Hs.24119 | 1.418719212 | 0.035013309 |
| | | related kinase 7 | | | | |
| 218463_s_at | 725 | MUS81 endonuclease | 11q13 | Hs.288798 | 1.403508772 | 0.034273747 |
| 213115_at | 613 | n/a | n/a | n/a | 1.398907104 | 0.038806001 |
| 218103_at | 712 | FtsJ homolog 3 (E. coli) | 17q23 | Hs.257486 | 1.393258427 | 5.58595E−05 |

TABLE 6
Top 50 transcripts significantly repressed (p < 0.05)
at baseline in VOD patient PBMCs

| | | | | | Fold Diff | p-value |
|---|---|---|---|---|---|---|
| Affymetrix ID | SEQ ID NO: | Name | Cyto Band | Unigene ID | (VOD/non-VOD) | (unequal) |
| 217023_x_at | 688 | tryptase beta 1, tryptase beta 2 | 16p13.3 | Hs.294158, Hs.405479 | 0.131687243 | 0.000341 |
| 210084_x_at | 525 | tryptase beta 2, tryptase, alpha | 16p13.3 | Hs.294158 | 0.133828996 | 0.000347153 |
| 208029_s_at | 58 | lysosomal associated protein | 8q22.1 | Hs.296398 | 0.133891213 | 0.020766934 |
| | | transmembrane 4 beta | | | | |
| 213844_at | 638 | homeo box A5 | 7p15-p14 | Hs.37034 | 0.148514851 | 0.003338613 |
| 215382_x_at | 670 | tryptase, alpha | 16p13.3 | Hs.334455 | 0.155477032 | 0.000156058 |
| 205683_x_at | 411 | tryptase beta 1, tryptase beta 2, tryptase, | 16p13.3 | Hs.405479 | 0.158102767 | 0.00154079 |
| | | alpha | | | | |
| 216474_x_at | 681 | tryptase beta 1, tryptase beta 2, tryptase, | 16p13.3 | Hs.334455 | 0.15954416 | 0.000338402 |
| | | alpha | | | | |
| 208789_at | 470 | polymerase I and transcript release factor | 17q21.2 | Hs.29759 | 0.172972973 | 0.004109481 |
| 202016_at | 235 | mesoderm specific transcript homolog | 7q32 | Hs.79284 | 0.176239182 | 0.001253864 |
| | | (mouse) | | | | |
| 207134_x_at | 447 | tryptase beta 1, tryptase beta 2, tryptase, | 16p13.3 | Hs.294158 | 0.180722892 | 0.002582561 |
| | | alpha | | | | |
| 214039_s_at | 643 | lysosomal associated protein | 8q22.1 | Hs.296398 | 0.221343874 | 0.015962264 |
| | | transmembrane 4 beta | | | | |
| 201015_s_at | 184 | junction plakoglobin | 17q21 | Hs.2340 | 0.227642276 | 2.96697E−06 |
| 202112_at | 240 | von Willebrand factor | 12p13.3 | Hs.110802 | 0.231884058 | 0.000771533 |
| 36711_at | 817 | v-maf musculoaponeurotic fibrosarcoma | 22q13.1 | Hs.51305 | 0.243093923 | 0.000110895 |
| | | oncogene homolog F (avian) | | | | |
| 207741_x_at | 456 | tryptase, alpha | 16p13.3 | Hs.334455 | 0.244741874 | 0.000539503 |
| 209395_at | 495 | chitinase 3-like 1 (cartilage glycoprotein- | 1q31.1 | Hs.75184 | 0.266666667 | 0.006968551 |
| | | 39) | | | | |
| 205131_x_at | 383 | stem cell growth factor; lymphocyte | 19q13.3 | Hs.425339 | 0.266666667 | 0.01030592 |
| | | secreted C-type lectin | | | | |
| 201005_at | 183 | CD9 antigen (p24) | 12p13.3 | Hs.1244 | 0.270613108 | 0.001191345 |
| 215111_s_at | 666 | transforming growth factor beta-stimulated | 13q14 | Hs.114360 | 0.279957582 | 0.00118603 |
| | | protein TSC-22 | | | | |
| 205624_at | 409 | carboxypeptidase A3 (mast cell) | 3q21-q25 | Hs.646 | 0.282225237 | 0.00249997 |
| 206067_s_at | 423 | Wilms tumor 1 | 11p13 | Hs.1145 | 0.282352941 | 0.001463202 |
| 201596_x_at | 222 | glutamate receptor, ionotropic, N-methyl D- | 12q13 | Hs.406013 | 0.292358804 | 0.002605841 |
| | | asparate-associated protein 1 (glutamate | | | | |
| | | binding), keratin 18 | | | | |
| 213479_at | 627 | neuronal pentraxin II | 7q21.3-q22.1 | Hs.3281 | 0.298507463 | 0.046185388 |
| 201324_at | 201 | epithelial membrane protein 1 | 12p12.3 | Hs.79368 | 0.299065421 | 0.001554754 |
| 210783_x_at | 549 | stem cell growth factor; lymphocyte | 19q13.3 | Hs.425339 | 0.301886792 | 0.009424594 |
| | | secreted C-type lectin | | | | |
| 216202_s_at | 678 | serine palmitoyltransferase, long chain | 14q24.3-q31 | Hs.59403 | 0.306220096 | 0.000219065 |
| | | base subunit 2 | | | | |
| 218880_at | 744 | FOS-like antigen 2 | 2p23-p22 | Hs.301612 | 0.310679612 | 0.000328157 |
| 206461_x_at | 435 | metallothionein 1H | 16q13 | Hs.2667 | 0.310679612 | 0.001303906 |
| 204885_s_at | 372 | mesothelin | 16p13.12 | Hs.155981 | 0.310679612 | 0.021690405 |
| 220377_at | 778 | chromosome 14 open reading frame 110 | 14q32.33 | Hs.128155 | 0.315789474 | 0.003681392 |
| 204011_at | 319 | sprouty homolog 2 (Drosophila) | 13q22.2 | Hs.18676 | 0.32 | 0.00124785 |
| 211948_x_at | 579 | KIAA1096 protein | 1q23.3 | Hs.69559 | 0.32 | 0.008446106 |
| 208886_at | 476 | H1 histone family, member 0 | 22q13.1 | Hs.226117 | 0.321715818 | 0.00641406 |
| 215047_at | 665 | BIA2 | 1q44 | Hs.51692 | 0.322147651 | 0.022774503 |
| 209905_at | 518 | homeo box A9 | 7p15-p14 | Hs.127428 | 0.322496749 | 0.022921003 |
| 218332_at | 721 | brain expressed, X-linked 1 | Xq21-q23 | Hs.334370 | 0.325 | 0.026696331 |
| 203411_s_at | 293 | lamin A/C | 1q21.2-q21.3 | Hs.377973 | 0.329411765 | 0.000122251 |
| 209774_x_at | 511 | chemokine (C—X—C motif) ligand 1 | 4q21 | Hs.75765 | 0.33256351 | 0.002389608 |
| | | (melanoma growth stimulating activity, | | | | |
| | | alpha), chemokine (C—X—C motif) | | | | |
| | | ligand 2 | | | | |
| 209757_s_at | 70 | v-myc myelocytomatosis viral related | 2p24.1 | Hs.25960 | 0.333333333 | 0.0002004 |
| | | oncogene, neuroblastoma derived (avian) | | | | |
| 201830_s_at | 227 | neuroepithelial cell transforming gene 1 | 10p15 | Hs.25155 | 0.335078534 | 0.000181408 |
| 219837_s_at | 769 | cytokine-like protein C17 | 4p16-p15 | Hs.13872 | 0.347826087 | 0.009008447 |
| 205051_s_at | 380 | v-kit Hardy-Zuckerman 4 feline sarcoma | 4q11-q12 | Hs.81665 | 0.348993289 | 0.006943974 |
| | | viral oncogene homolog | | | | |
| 211709_s_at | 566 | stem cell growth factor; lymphocyte | 19q13.3 | Hs.425339 | 0.354948805 | 0.033343631 |
| | | secreted C-type lectin | | | | |
| 210665_at | 75 | tissue factor pathway inhibitor (lipoprotein- | 2q31-q32.1 | Hs.170279 | 0.355555556 | 0.001918239 |
| | | associated coagulation inhibitor) | | | | |
| 209301_at | 491 | carbonic anhydrase II | 8q22 | Hs.155097 | 0.355555556 | 0.003901677 |
| 204468_s_at | 9 | tyrosine kinase with immunoglobulin and | 1p34-p33 | Hs.78824 | 0.36036036 | 0.034680165 |
| | | epidermal growth factor homology domains | | | | |
| 208767_s_at | 469 | lysosomal associated protein | 8q22.1 | Hs.296398 | 0.361111111 | 0.022507793 |
| | | transmembrane 4 beta | | | | |
| 209183_s_at | 485 | decidual protein induced by progesterone | 10q11.23 | Hs.93675 | 0.363636364 | 0.0038473 |
| 213260_at | 619 | | | Hs.284186 | 0.366666667 | 0.030189907 |
| 209488_s_at | 497 | RNA-binding protein gene with multiple | 8p12-p11 | Hs.80248 | 0.367816092 | 0.013648398 |
| | | splicing | | | | |

### Identification of Leukemia Diagnostic Genes

[0090] The above described methods can also be used to identify leukemia diagnostic genes (also referred to as disease genes). Each of these genes is differentially expressed in PBMCs of leukemia patients relative to PBMCs of leukemia-free or disease-free humans. In many cases, the average PBMC expression level of a leukemia disease gene in leukemia patients is statistically different from that in leukemia-free or disease-free humans. For example, the p-value of a Student's t-test for the observed difference can be no more than 0.05, 0.01, 0.005, 0.001, 0.0005, 0.0001, or less. In many other cases, the difference between the average PBMC expression levels of a leukemia disease gene in leukemia patients and that in leukemia-free humans is at least 2, 3, 4, 5, 10, 20, or more folds. The leukemia disease genes of the present invention can be used to detect the presence or absence, or monitor the development, progression or treatment of leukemia in a human of interest.

[0091] Leukemia disease genes can also be identified by correlating PBMC expression profiles with a class distinction under a class-based correlation metric (e.g., the nearest-neighbor analysis or the significance method of microarrays (SAM) method). The class distinction represents an idealized gene expression pattern in PBMCs of leukemia patients and disease-free humans. In many examples, the correlation between the PBMC expression profile of a leukemia disease gene and the class distinction is above the 1%, 5%, 10%, 25%, or 50% significance level under a permutation test. Gene classifiers can be constructed using the leukemia disease genes of the present invention. These classifiers can effectively predict class membership (e.g., leukemia versus leukemia-free) of a human of interest.

### Identification of AML Diagnosis Genes Using HG-U133A Microarrays

[0092] As an example, AML-associated expression patterns in peripheral blood were identified by using the U133A gene chip platform. Mean levels of baseline gene expression in PBMCs from a group of disease-free volunteers (n=20) were compared with mean levels of corresponding baseline gene expression in PBMCs from AML patients (n=36). Transcripts showing elevated or decreased levels in PBMCs of AML patients relative to healthy controls were identified. Examples of these transcripts are depicted in Table 7. Each transcript in Table 7 has at least 2-fold difference in the mean level of expression between AML PBMCs and disease-free PBMCs (“AML/Disease-Free”). The p-value of the Student's t-test (unequal variances) for the observed difference (“P-Value”) is also shown in Table 7. “COV” refers to coefficient of variance.

TABLE 7
Example of AML Disease Genes Differentially Expressed in PBMCs of AML Patients Relative to Disease-Free Volunteers

| | | AML/ | | | COV | | | |
|---|---|---|---|---|---|---|---|---|
| | SEQ ID | Disease- | | COV | (Disease | Gene | | Unigene |
| Qualifier | NO: | Free | P-Value | (AML) | Free) | Symbol | Gene Name | No. |
| 203948_s_at | 316 | 46.69 | 4.63E−06 | 108.53% | 33.68% | MPO | myeloperoxidase | Hs.1817 |
| 203949_at | 317 | 35.14 | 1.19E−06 | 99.53% | 29.31% | MPO | myeloperoxidase | Hs.1817 |
| 206310_at | 429 | 22.75 | 3.86E−06 | | | SPINK2 | serine protease inhibitor, Kazal | Hs.98243 |
| | | | | | | | type, 2 (acrosin-trypsin | |
| | | | | | | | inhibitor) | |
| 209905_at | 518 | 21.08 | 5.44E−05 | | | HOXA9 | homeo box A9 | Hs.127428 |
| 214575_s_at | 658 | 20.02 | 3.88E−04 | 145.25% | 28.21% | AZU1 | azurocidin 1 (cationic | Hs.72885 |
| | | | | | | | antimicrobial protein 37) | |
| 206871_at | 444 | 18.41 | 1.23E−04 | 131.40% | 48.57% | ELA2 | elastase 2, neutrophil | Hs.99863 |
| 214651_s_at | 660 | 16.25 | 5.98E−05 | 123.43% | 21.22% | HOXA9 | homeo box A9 | Hs.127428 |
| 205653_at | 410 | 14.76 | 1.24E−03 | 159.20% | 28.58% | CTSG | cathepsin G | Hs.100764 |
| 210084_x_at | 525 | 14.18 | 1.20E−04 | | | | tryptase beta 1, tryptase, alpha | Hs.347933 |
| 205683_x_at | 411 | 13.92 | 4.32E−04 | | | | tryptase beta 1, tryptase beta | Hs.347933 |
| | | | | | | | 2, tryptase, alpha | |
| 204798_at | 368 | 12.95 | 7.41E−10 | 66.25% | 24.66% | MYB | v-myb myeloblastosis viral | Hs.1334 |
| | | | | | | | oncogene homolog (avian) | |
| 206851_at | 443 | 12.83 | 7.34E−03 | 194.31% | 50.67% | RNASE3 | ribonuclease, RNase A family, | Hs.73839 |
| | | | | | | | 3 (eosinophil cationic protein) | |
| 217023_x_at | 688 | 12.02 | 1.41E−04 | | | | tryptase beta 1, tryptase beta 2 | Hs.294158, |
| | | | | | | | | Hs.347933 |
| 216474_x_at | 681 | 11.06 | 8.25E−05 | | | | tryptase beta 1, tryptase beta 2 | Hs.347933 |
| 202016_at | 235 | 11.02 | 3.63E−04 | 138.17% | 24.92% | MEST | mesoderm specific transcript | Hs.79284 |
| | | | | | | | homolog (mouse) | |
| 207134_x_at | 447 | 10.94 | 6.98E−04 | 146.58% | 35.48% | TPS1, | tryptase beta 1, tryptase beta | Hs.294158 |
| | | | | | | TPSB1, | 2, tryptase, alpha | |
| | | | | | | TPSB2 | | |
| 215382_x_at | 670 | 10.85 | 5.25E−05 | | | | tryptase beta 1, tryptase, alpha | Hs.347933 |
| 205950_s_at | 420 | 10.85 | 5.23E−04 | | | CA1 | carbonic anhydrase I | Hs.23118 |
| 205051_s_at | 380 | 10.24 | 2.37E−05 | 111.13% | 30.96% | KIT | v-kit Hardy-Zuckerman 4 feline | Hs.81665 |
| | | | | | | | sarcoma viral oncogene | |
| | | | | | | | homolog | |
| 211709_s_at | 566 | 10.06 | 1.23E−06 | 92.43% | 24.57% | SCGF | stem cell growth factor; | Hs.425339, |
| | | | | | | | lymphocyte secreted C-type | Hs.105927 |
| | | | | | | | lectin | |
| 205131_x_at | 383 | 9.55 | 1.02E−04 | | | | stem cell growth factor; | Hs.105927 |
| | | | | | | | lymphocyte secreted C-type | |
| | | | | | | | lectin | |
| 219054_at | 753 | 8.32 | 2.05E−06 | | | FLJ14054 | hypothetical protein FLJ14054 | Hs.13528 |
| 204304_s_at | 340 | 7.69 | 4.74E−07 | 84.71% | 30.22% | PROML1 | prominin-like 1 (mouse) | Hs.112360 |
| 206674_at | 440 | 7.41 | 2.90E−07 | | | FLT3 | fms-related tyrosine kinase 3 | Hs.385 |
| 207741_x_at | 456 | 7.33 | 5.05E−05 | | | | tryptase, alpha | Hs.334455 |
| 202589_at | 257 | 7.08 | 1.63E−05 | 103.09% | 49.47% | TYMS | thymidylate synthetase | Hs.29475, |
| | | | | | | | | Hs.82962 |
| 210783_x_at | 549 | 6.99 | 5.96E−05 | 112.68% | 19.95% | SCGF | stem cell growth factor; | Hs.425339, |
| | | | | | | | lymphocyte secreted C-type | Hs.105927 |
| | | | | | | | lectin | |
| 211922_s_at | 576 | 6.71 | 1.13E−07 | 76.92% | 32.08% | CAT | catalase | Hs.395771, |
| | | | | | | | | Hs.76359 |
| 203373_at | 13 | 6.70 | 1.95E−02 | 208.35% | 23.04% | STATI2 | STAT induced STAT inhibitor-2 | Hs.405946 |
| 201427_s_at | 208 | 6.64 | 7.13E−04 | 137.31% | 0.00% | SEPP1 | selenoprotein P, plasma, 1 | Hs.275775, |
| | | | | | | | | Hs.3314 |
| 206111_at | 424 | 6.60 | 2.95E−05 | 106.04% | 41.83% | RNASE2 | ribonuclease, RNase A family, | Hs.728 |
| | | | | | | | 2 (liver, eosinophil-derived | |
| | | | | | | | neurotoxin) | |
| 213844_at | 638 | 6.60 | 2.86E−03 | 158.62% | 46.12% | HOXA5 | homeo box A5 | Hs.37034 |
| 202503_s_at | 255 | 6.39 | 2.92E−06 | | | KIAA0101 | KIAA0101 gene product | Hs.81892 |
| 205899_at | 417 | 6.26 | 1.91E−03 | 150.19% | 16.83% | CCNA1 | cyclin A1 | Hs.79378 |
| 220377_at | 778 | 6.14 | 1.93E−04 | 120.57% | 14.58% | HSPC053 | HSPC053 protein | Hs.128155 |
| 201310_s_at | 200 | 5.92 | 2.13E−09 | | | | P311 protein | Hs.142827 |
| 219672_at | 767 | 5.86 | 9.81E−04 | 137.79% | 96.37% | ERAF | erythroid associated factor | Hs.274309 |
| 208029_s_at | 58 | 5.69 | 2.37E−02 | 208.96% | 30.33% | LC27 | putative integral membrane | Hs.296398 |
| | | | | | | | transporter | |
| 205624_at | 409 | 5.66 | 9.30E−05 | 111.81% | 43.05% | CPA3 | carboxypeptidase A3 (mast | Hs.646 |
| | | | | | | | cell) | |
| 205609_at | 407 | 5.59 | 1.49E−06 | 85.15% | 34.40% | ANGPT1 | angiopoietin 1 | Hs.2463 |
| 206834_at | 442 | 5.49 | 5.46E−05 | 106.29% | 97.40% | HBD | hemoglobin, delta | Hs.36977 |
| 205557_at | 402 | 5.28 | 1.42E−02 | 188.13% | 75.52% | BPI | bactericidal/permeability- | Hs.89535 |
| | | | | | | | increasing protein | |
| 201162_at | 192 | 5.25 | 3.09E−07 | 76.99% | 53.67% | IGFBP7 | insulin-like growth factor | Hs.119206 |
| | | | | | | | binding protein 7 | |
| 201432_at | 209 | 5.18 | 1.43E−09 | | | | catalase | Hs.76359 |
| 204430_s_at | 8 | 5.17 | 6.73E−04 | 129.63% | 30.33% | SLC2A5 | solute carrier family 2 | Hs.33084 |
| | | | | | | | (facilitated glucose/fructose | |
| | | | | | | | transporter), member 5 | |
| 220416_at | 780 | 5.16 | 1.24E−06 | 82.78% | 18.42% | KIAA1939 | KIAA1939 protein | Hs.182738 |
| 204030_s_at | 322 | 5.06 | 2.43E−03 | 147.20% | 34.79% | SCHIP1 | schwannomin interacting | Hs.61490 |
| | | | | | | | protein 1 | |
| 211743_s_at | 568 | 4.95 | 7.28E−04 | 129.14% | 32.90% | PRG2 | proteoglycan 2, bone marrow | Hs.99962 |
| | | | | | | | (natural killer cell activator, | |
| | | | | | | | eosinophil granule major basic | |
| | | | | | | | protein) | |
| 201416_at | 206 | 4.94 | 1.01E−04 | 109.06% | 35.67% | MEIS3, | Meis1, myeloid ecotropic viral | Hs.83484 |
| | | | | | | SOX4 | integration site 1 homolog 3 | |
| | | | | | | | (mouse), SRY (sex | |
| | | | | | | | determining region Y)-box 4 | |
| 213150_at | 617 | 4.90 | 3.44E−04 | 120.37% | 26.79% | HOXA10 | homeo box A10 | Hs.110637 |
| 209543_s_at | 502 | 4.88 | 6.90E−07 | 78.99% | 30.30% | CD34, | CD34 antigen, FLJ00005 | Hs.374990 |
| | | | | | | FLJ00005 | protein | |
| 213258_at | 65 | 4.82 | 2.40E−07 | | | | | Hs.288582 |
| 216667_at | 684 | 4.79 | 3.15E−03 | 149.58% | 27.72% | | | |
| 210664_s_at | 546 | 4.73 | 8.77E−06 | 90.93% | 34.92% | TFPI | tissue factor pathway inhibitor | Hs.170279 |
| | | | | | | | (lipoprotein-associated | |
| | | | | | | | coagulation inhibitor) | |
| 206067_s_at | 423 | 4.72 | 2.81E−04 | | | WT1 | Wilms tumor 1 | Hs.1145 |
| 209757_s_at | 70 | 4.69 | 8.72E−06 | 90.78% | 0.00% | MYCN | v-myc myelocytomatosis viral | Hs.25960 |
| | | | | | | | related oncogene, | |
| | | | | | | | neuroblastoma derived (avian) | |
| 213515_x_at | 629 | 4.68 | 2.22E−05 | 95.77% | 91.95% | GARS, | glycyl-tRNA synthetase, | Hs.356717, |
| | | | | | | HBG1, | hemoglobin, gamma A, | Hs.283108 |
| | | | | | | HBG2 | hemoglobin, gamma G | |
| 219837_s_at | 769 | 4.60 | 2.68E−04 | 115.74% | 34.92% | C17 | cytokine-like protein C17 | Hs.13872 |
| 218899_s_at | 746 | 4.57 | 9.36E−04 | 129.54% | 35.71% | BAALC | brain and acute leukemia, | Hs.169395 |
| | | | | | | | cytoplasmic | |
| 210665_at | 75 | 4.55 | 5.86E−05 | 102.39% | 28.60% | TFPI | tissue factor pathway inhibitor | Hs.170279 |
| | | | | | | | (lipoprotein-associated | |
| | | | | | | | coagulation inhibitor) | |
| 206478_at | 436 | 4.52 | 1.57E−04 | 110.17% | 39.54% | KIAA0125 | KIAA0125 gene product | Hs.38365 |
| 201825_s_at | 226 | 4.51 | 2.04E−07 | 72.49% | 26.57% | LOC51097 | CGI-49 protein | Hs.238126 |
| 202441_at | 252 | 4.46 | 3.52E−09 | 59.64% | 32.71% | KEO4 | similar to Caenorhabditis | Hs.285818 |
| | | | | | | | elegans protein C42C1.9 | |
| 209771_x_at | 510 | 4.43 | 3.13E−02 | 206.78% | 65.40% | CD24 | CD24 antigen (small cell lung | Hs.375108 |
| | | | | | | | carcinoma cluster 4 antigen) | |
| 209160_at | 484 | 4.38 | 3.56E−04 | 116.99% | 34.40% | AKR1C3 | aldo-keto reductase family 1, | Hs.78183 |
| | | | | | | | member C3 (3-alpha | |
| | | | | | | | hydroxysteroid | |
| | | | | | | | dehydrogenase, type II) | |
| 216379_x_at | 680 | 4.38 | 2.65E−02 | 199.51% | 62.52% | CD24, | CD24 antigen (small cell lung | Hs.381004 |
| | | | | | | G22P1, | carcinoma cluster 4 antigen), | |
| | | | | | | KIAA1919 | KIAA1919 protein, thyroid | |
| | | | | | | | autoantigen 70 kD (Ku antigen) | |
| 206207_at | 427 | 4.35 | 3.42E−02 | 209.28% | 70.13% | CLC | Charot-Leyden crystal protein | Hs.889 |
| 204561_x_at | 353 | 4.33 | 1.62E−02 | 182.63% | 0.00% | APOC2 | apolipoprotein C-II | Hs.75615 |
| 203372_s_at | 16 | 4.33 | 4.22E−02 | 218.85% | 18.42% | STATI2 | STAT induced STAT inhibitor-2 | Hs.405946 |
| 207269_at | 448 | 4.30 | 9.46E−03 | 167.00% | 84.09% | DEFA4 | defensin, alpha 4, corticostatin | Hs.2582 |
| 218788_s_at | 735 | 4.30 | 3.35E−06 | 83.45% | 19.69% | FLJ21080 | hypothetical protein FLJ21080 | Hs.8109 |
| 211821_x_at | 572 | 4.25 | 1.03E−03 | 128.12% | 31.72% | GYPA | glycophorin A (includes MN | Hs.108694 |
| | | | | | | | blood group) | |
| 204419_x_at | 347 | 4.25 | 5.06E−05 | 98.31% | 100.03% | GARS, | glycyl-tRNA synthetase, | Hs.386655 |
| | | | | | | HBG1, | hemoglobin, gamma A, | |
| | | | | | | HBG2 | hemoglobin, gamma G | |
| 213147_at | 616 | 4.19 | 2.64E−05 | 94.35% | 37.81% | HOXA10 | homeo box A10 | Hs.110637 |
| 221004_s_at | 792 | 4.11 | 7.39E−06 | 86.29% | 36.24% | ITM3 | integral membrane protein 3 | Hs.111577 |
| 204848_x_at | 371 | 4.09 | 5.66E−05 | 97.77% | 101.47% | HBG1, | hemoglobin, gamma A, | Hs.283108 |
| | | | | | | HBG2 | hemoglobin, gamma G | |
| 211560_s_at | 563 | 4.08 | 9.01E−03 | 159.47% | 191.88% | ALAS2 | aminolevulinate, delta-, | Hs.381218 |
| | | | | | | | synthase 2 | |
| | | | | | | | (sideroblastic/hypochromic | |
| | | | | | | | anemia) | |
| 206135_at | 425 | 4.00 | 4.98E−02 | 221.44% | 0.00% | ZNF387 | zinc finger protein 387 | Hs.151449 |
| 205366_s_at | 6 | 3.87 | 2.03E−04 | 107.19% | 30.33% | HOXB6 | homeo box B6 | Hs.98428 |
| 213110_s_at | 612 | 3.87 | 2.06E−05 | 90.35% | 32.83% | COL4A5 | collagen, type IV, alpha 5 | Hs.169825 |
| | | | | | | | (Alport syndrome) | |
| 219654_at | 766 | 3.85 | 1.23E−06 | 75.89% | 35.75% | PTPLA | protein tyrosine phosphatase- | Hs.114062 |
| | | | | | | | like (proline instead of catalytic | |
| | | | | | | | arginine), member a | |
| 201596_x_at | 222 | 3.84 | 1.13E−03 | 125.06% | 18.96% | KRT18 | keratin 18 | Hs.406013 |
| 220232_at | 776 | 3.82 | 2.74E−07 | 69.76% | 30.96% | FLJ21032 | hypothetical protein FLJ21032 | Hs.379191 |
| 207341_at | 450 | 3.77 | 2.42E−03 | 134.65% | 33.45% | PRTN3 | proteinase 3 (serine | Hs.928 |
| | | | | | | | proteinase, neutrophil, | |
| | | | | | | | Wegener granulomatosis | |
| | | | | | | | autoantigen) | |
| 210746_s_at | 547 | 3.73 | 7.35E−03 | 151.59% | 136.15% | EPB42 | erythrocyte membrane protein | Hs.733 |
| | | | | | | | band 4.2 | |
| 201892_s_at | 229 | 3.71 | 7.86E−08 | 64.85% | 33.27% | IMPDH2 | IMP (inosine monophosphate) | Hs.75432 |
| | | | | | | | dehydrogenase 2 | |
| 214433_s_at | 652 | 3.70 | 8.36E−03 | 153.06% | 158.09% | SELENBP1 | selenium binding protein 1 | Hs.334841 |
| 218718_at | 734 | 3.70 | 1.78E−06 | 76.48% | 21.46% | PDGFC | platelet derived growth factor C | Hs.43080 |
| 213479_at | 627 | 3.64 | 2.60E−02 | 187.19% | 14.58% | NPTX2 | neuronal pentraxin II | Hs.3281 |
| 201459_at | 210 | 3.61 | 4.46E−07 | 70.09% | 40.13% | RUVBL2 | RuvB-like 2 (E. coli) | Hs.6455 |
| 218313_s_at | 720 | 3.60 | 6.70E−07 | 71.60% | 22.51% | GALNT7 | UDP-N-acetyl-alpha-D- | Hs.246315 |
| | | | | | | | galactosamine:polypeptide N- | |
| | | | | | | | acetylgalactosaminyltransferase | |
| | | | | | | | 7 (GalNAc-T7) | |
| 207459_x_at | 451 | 3.59 | 3.58E−05 | 91.28% | 28.85% | GYPA, | glycophorin A (includes MN | Hs.372513 |
| | | | | | | GYPB | blood group), glycophorin B | |
| | | | | | | | (includes Ss blood group) | |
| 214407_x_at | 651 | 3.58 | 2.91E−04 | 107.39% | 22.02% | GYPA, | glycophorin A (includes MN | Hs.372513 |
| | | | | | | GYPB | blood group), glycophorin B | |
| | | | | | | | (includes Ss blood group) | |
| 202502_at | 254 | 3.58 | 1.42E−07 | 65.88% | 20.33% | ACADM | acyl-Coenzyme A | Hs.79158 |
| | | | | | | | dehydrogenase, C-4 to C-12 | |
| | | | | | | | straight chain | |
| 201418_s_at | 207 | 3.55 | 7.35E−07 | 71.24% | 61.97% | MEIS3, | Meis1, myeloid ecotropic viral | Hs.83484 |
| | | | | | | SOX4 | integration site 1 homolog 3 | |
| | | | | | | | (mouse), SRY (sex | |
| | | | | | | | determining region Y)-box 4 | |
| 209790_s_at | 512 | 3.49 | 4.47E−05 | 91.75% | 25.40% | CASP6 | caspase 6, apoptosis-related | Hs.3280 |
| | | | | | | | cysteine protease | |
| 204069_at | 325 | 3.48 | 3.01E−04 | 106.42% | 25.85% | MEIS1 | Meis1, myeloid ecotropic viral | Hs.170177 |
| | | | | | | | integration site 1 homolog | |
| | | | | | | | (mouse) | |
| 203502_at | 295 | 3.46 | 5.36E−04 | 110.86% | 77.38% | BPGM | 2,3-bisphosphoglycerate | Hs.198365 |
| | | | | | | | mutase | |
| 206726_at | 441 | 3.45 | 9.57E−03 | 155.35% | 30.96% | PGDS | prostaglandin D2 synthase, | Hs.128433 |
| | | | | | | | hematopoietic | |
| 209813_x_at | 513 | 3.42 | 9.06E−04 | 116.74% | 46.61% | TRG@ | T cell receptor gamma locus | Hs.112259 |
| 218332_at | 721 | 3.40 | 1.19E−02 | 159.40% | 27.69% | BEX1 | brain expressed, X-linked 1 | Hs.334370 |
| 219218_at | 757 | 3.37 | 2.70E−05 | 87.16% | 34.79% | FLJ23058 | hypothetical protein FLJ23058 | Hs.98968 |
| 211144_x_at | 556 | 3.37 | 1.07E−03 | 117.91% | 41.76% | TRG@ | T cell receptor gamma locus | Hs.112259 |
| 202444_s_at | 253 | 3.31 | 2.44E−10 | 47.88% | 12.86% | KEO4 | similar to Caenorhabditis | Hs.285818 |
| | | | | | | | elegans protein C42C1.9 | |
| 201193_at | 194 | 3.29 | 4.31E−05 | 89.35% | 22.26% | IDH1 | isocitrate dehydrogenase 1 | Hs.11223 |
| | | | | | | | (NADP+), soluble | |
| 212175_s_at | 587 | 3.28 | 2.59E−08 | 58.54% | 25.74% | AK2 | adenylate kinase 2 | Hs.334802 |
| 205513_at | 400 | 3.28 | 1.70E−03 | 122.27% | 42.32% | TCN1 | transcobalamin I (vitamin B12 | Hs.2012 |
| | | | | | | | binding protein, R binder | |
| | | | | | | | family) | |
| 205592_at | 403 | 3.25 | 3.97E−03 | 131.52% | 121.76% | SLC4A1 | solute carrier family 4, anion | Hs.432645 |
| | | | | | | | exchanger, member 1 | |
| | | | | | | | (erythrocyte membrane protein | |
| | | | | | | | band 3, Diego blood group) | |
| 205769_at | 413 | 3.24 | 1.32E−05 | 81.73% | 33.71% | FACVL1 | fatty-acid-Coenzyme A ligase, | Hs.11729 |
| | | | | | | | very long-chain 1 | |
| 212141_at | 586 | 3.19 | 7.85E−05 | 92.20% | 0.00% | MCM4 | MCM4 minichromosome | Hs.154443 |
| | | | | | | | maintenance deficient 4 (S. cerevisiae) | |
| 213541_s_at | 631 | 3.17 | 2.40E−09 | 51.84% | 32.90% | ERG | v-ets erythroblastosis virus | Hs.45514 |
| | | | | | | | E26 oncogene like (avian) | |
| 204468_s_at | 9 | 3.17 | 1.48E−02 | 160.05% | 0.00% | TIE | tyrosine kinase with | Hs.78824 |
| | | | | | | | immunoglobulin and epidermal | |
| | | | | | | | growth factor homology | |
| | | | | | | | domains | |
| 222036_s_at | 807 | 3.16 | 1.44E−04 | 96.14% | 7.37% | MCM4 | MCM4 minichromosome | Hs.319215 |
| | | | | | | | maintenance deficient 4 (S. cerevisiae) | |
| 220668_s_at | 39 | 3.15 | 2.45E−07 | 64.13% | 20.33% | DNMT3B | DNA (cytosine-5-)- | Hs.251673 |
| | | | | | | | methyltransferase 3 beta | |
| 218847_at | 741 | 3.15 | 2.96E−12 | 40.44% | 50.24% | IMP-2 | IGF-II mRNA-binding protein 2 | Hs.30299 |
| 217294_s_at | 691 | 3.14 | 2.68E−08 | 57.40% | 44.65% | ENO1 | enolase 1, (alpha) | Hs.381397 |
| 213779_at | 636 | 3.12 | 5.52E−07 | 66.61% | 27.57% | LOC129080 | putative emu1 | Hs.289106 |
| 218825_at | 738 | 3.12 | 7.45E−07 | 67.61% | 35.39% | LOC51162 | NEU1 protein | Hs.91481 |
| 218858_at | 743 | 3.09 | 1.82E−05 | 81.78% | 17.08% | FLJ12428 | hypothetical protein FLJ12428 | Hs.87729 |
| 216153_x_at | 676 | 3.08 | 8.64E−06 | 77.60% | 35.89% | RECK | reversion-inducing-cysteine- | Hs.29640 |
| | | | | | | | rich protein with kazal motifs | |
| 204467_s_at | 351 | 3.08 | 3.20E−02 | 176.33% | 158.31% | SNCA | synuclein, alpha (non A4 | Hs.76930 |
| | | | | | | | component of amyloid | |
| | | | | | | | precursor) | |
| 204409_s_at | 345 | 3.08 | 8.03E−04 | 109.25% | 66.65% | EIF1AY | eukaryotic translation initiation | Hs.155103 |
| | | | | | | | factor 1A, Y chromosome | |
| 205202_at | 384 | 3.05 | 2.34E−05 | 82.67% | 22.02% | PCMT1 | protein-L-isoaspartate (D- | Hs.79137 |
| | | | | | | | aspartate) O- | |
| | | | | | | | methyltransferase | |
| 205382_s_at | 394 | 3.05 | 2.83E−05 | 83.59% | 34.99% | DF | D component of complement | Hs.155597 |
| | | | | | | | (adipsin) | |
| 209576_at | 503 | 3.04 | 7.79E−04 | 109.41% | 14.58% | GNAI1 | guanine nucleotide binding | Hs.203862 |
| | | | | | | | protein (G protein), alpha | |
| | | | | | | | inhibiting activity polypeptide 1 | |
| 211546_x_at | 562 | 3.03 | 6.29E−03 | 136.16% | 91.15% | SNCA | synuclein, alpha (non A4 | Hs.76930 |
| | | | | | | | component of amyloid | |
| | | | | | | | precursor) | |
| 212115_at | 585 | 3.02 | 4.78E−04 | 103.69% | 45.78% | FLJ13092 | hypothetical protein FLJ13092 | Hs.172035 |
| 211820_x_at | 571 | 3.01 | 6.29E−04 | 106.39% | 33.71% | GYPA | glycophorin A (includes MN | Hs.108694 |
| | | | | | | | blood group) | |
| 210254_at | 530 | 2.98 | 6.65E−03 | 137.19% | 59.25% | MS4A3 | membrane-spanning 4- | Hs.99960 |
| | | | | | | | domains, subfamily A, member | |
| | | | | | | | 3 (hematopoietic cell-specific) | |
| 210829_s_at | 550 | 2.97 | 2.80E−05 | 82.60% | 20.75% | SSBP2 | single-stranded DNA binding | Hs.424652 |
| | | | | | | | protein 2 | |
| 200923_at | 177 | 2.97 | 1.47E−04 | 93.21% | 32.12% | LGALS3BP | lectin, galactoside-binding, | Hs.79339 |
| | | | | | | | soluble, 3 binding protein | |
| 204900_x_at | 375 | 2.96 | 1.38E−04 | 92.64% | 31.39% | SAP30 | sin3-associated polypeptide, | Hs.20985 |
| | | | | | | | 30 kD | |
| 202845_s_at | 268 | 2.95 | 1.36E−07 | 59.80% | 60.88% | RALBP1 | ralA binding protein 1 | Hs.75447 |
| 203787_at | 307 | 2.94 | 3.89E−05 | 83.97% | 20.55% | SSBP2 | single-stranded DNA binding | Hs.169833 |
| | | | | | | | protein 2 | |
| 206622_at | 437 | 2.93 | 4.83E−02 | 193.09% | 26.43% | TRH | thyrotropin-releasing hormone | Hs.182231 |
| 201413_at | 205 | 2.93 | 5.86E−08 | 57.63% | 26.79% | HSD17B4 | hydroxysteroid (17-beta) | Hs.75441 |
| | | | | | | | dehydrogenase 4 | |
| 201054_at | 189 | 2.91 | 2.70E−07 | 62.01% | 29.74% | HNRPA0 | heterogeneous nuclear | Hs.77492 |
| | | | | | | | ribonucleoprotein A0 | |
| 204647_at | 360 | 2.90 | 2.54E−04 | 96.25% | 29.14% | HOMER-3 | Homer, neuronal immediate | Hs.424053 |
| | | | | | | | early gene, 3 | |
| 219789_at | 768 | 2.89 | 4.95E−06 | 72.67% | 26.79% | NPR3 | natriuretic peptide receptor | Hs.123655 |
| | | | | | | | C/guanylate cyclase C | |
| | | | | | | | (atrionatriuretic peptide | |
| | | | | | | | receptor C) | |
| 204011_at | 319 | 2.88 | 7.38E−04 | 105.71% | 21.81% | SPRY2 | sprouty homolog 2 | Hs.18676 |
| | | | | | | | (Drosophila) | |
| 204391_x_at | 343 | 2.87 | 4.74E−11 | 42.14% | 25.33% | TIF1 | transcriptional intermediary | Hs.183858 |
| | | | | | | | factor 1 | |
| 205844_at | 415 | 2.85 | 9.58E−03 | 141.91% | 32.83% | VNN1 | vanin 1 | Hs.12114 |
| 209183_s_at | 485 | 2.85 | 1.07E−03 | 108.94% | 19.95% | DEPP | decidual protein induced by | Hs.93675 |
| | | | | | | | progesterone | |
| 214657_s_at | 661 | 2.82 | 1.23E−06 | 66.05% | 31.54% | MEN1 | multiple endocrine neoplasia I | Hs.434021 |
| 200615_s_at | 157 | 2.81 | 6.19E−08 | 56.39% | 39.24% | AP2B1 | adaptor-related protein | Hs.74626 |
| | | | | | | | complex 2, beta 1 subunit | |
| 204466_s_at | 350 | 2.80 | 1.14E−02 | 141.03% | 106.77% | SNCA | synuclein, alpha (non A4 | Hs.76930 |
| | | | | | | | component of amyloid | |
| | | | | | | | precursor) | |
| 215537_x_at | 672 | 2.80 | 1.10E−06 | 65.18% | 41.33% | DDAH2 | dimethylarginine | Hs.247362 |
| | | | | | | | dimethylaminohydrolase 2 | |
| 206480_at | 66 | 2.79 | 4.45E−05 | 82.52% | 19.95% | LTC4S | leukotriene C4 synthase | Hs.456 |
| 222067_x_at | 809 | 2.77 | 5.86E−06 | 71.70% | 31.83% | H2BFB | H2B histone family, member B | Hs.180779 |
| 204173_at | 333 | 2.77 | 4.04E−12 | 37.74% | 23.97% | MLC1SA | myosin light chain 1 slow a | Hs.90318 |
| 204885_s_at | 372 | 2.77 | 2.56E−02 | 164.20% | 19.95% | MSLN | mesothelin | Hs.155981 |
| 212268_at | 593 | 2.75 | 5.30E−08 | 55.45% | 22.18% | SERPINB1 | serine (or cysteine) proteinase | Hs.183583 |
| | | | | | | | inhibitor, clade B (ovalbumin), | |
| | | | | | | | member 1 | |
| 215182_x_at | 667 | 2.75 | 2.81E−08 | 53.77% | 25.51% | | | Hs.274511 |
| 201037_at | 188 | 2.75 | 1.97E−06 | 66.97% | 23.73% | PFKP | phosphofructokinase, platelet | Hs.99910 |
| 205900_at | 418 | 2.75 | 2.10E−02 | 151.32% | 152.69% | KRT1 | keratin 1 (epidermolytic | Hs.80828 |
| | | | | | | | hyperkeratosis) | |
| 214236_at | 648 | 2.74 | 4.55E−04 | 98.32% | 26.79% | | | Hs.343877 |
| 210644_s_at | 544 | 2.74 | 4.64E−08 | 54.96% | 29.13% | LAIR1 | leukocyte-associated Ig-like | Hs.115808 |
| | | | | | | | receptor 1 | |
| 201563_at | 217 | 2.73 | 1.24E−06 | 64.94% | 22.33% | SORD | sorbitol dehydrogenase | Hs.878 |
| 210395_x_at | 535 | 2.72 | 1.04E−02 | 139.39% | 52.16% | MYL4 | myosin, light polypeptide 4, | Hs.356717 |
| | | | | | | | alkali; atrial, embryonic | |
| 213301_x_at | 621 | 2.72 | 5.42E−10 | 45.00% | 23.44% | TIF1 | transcriptional intermediary | Hs.183858 |
| | | | | | | | factor 1 | |
| 218039_at | 709 | 2.71 | 1.12E−06 | 64.37% | 23.77% | ANKT | nucleolar protein ANKT | Hs.279905 |
| 218069_at | 710 | 2.70 | 1.77E−05 | 75.65% | 39.91% | MGC5627 | hypothetical protein MGC5627 | Hs.237971 |
| 203588_s_at | 300 | 2.69 | 2.26E−06 | 66.62% | 29.27% | TFDP2 | transcription factor Dp-2 (E2F | Hs.379018 |
| | | | | | | | dimerization partner 2) | |
| 218883_s_at | 745 | 2.68 | 1.49E−05 | 74.69% | 22.08% | FLJ23468 | hypothetical protein FLJ23468 | Hs.38178 |
| 209360_s_at | 493 | 2.67 | 3.42E−07 | 59.70% | 35.04% | RUNX1 | runt-related transcription factor | Hs.129914 |
| | | | | | | | 1 (acute myeloid leukemia 1; | |
| | | | | | | | aml1 oncogene) | |
| 201503_at | 212 | 2.66 | 4.32E−05 | 80.08% | 23.20% | G3BP | Ras-GTPase-activating protein | Hs.220689 |
| | | | | | | | SH3-domain-binding protein | |
| 200696_s_at | 160 | 2.65 | 2.10E−08 | 51.86% | 26.02% | GSN | gelsolin (amyloidosis, Finnish | Hs.290070 |
| | | | | | | | type) | |
| 216054_x_at | 675 | 2.63 | 6.99E−03 | 128.94% | 51.23% | MYL4 | myosin, light polypeptide 4, | Hs.433562 |
| | | | | | | | alkali; atrial, embryonic | |
| 218342_s_at | 722 | 2.62 | 1.78E−08 | 51.17% | 29.01% | FLJ23309 | hypothetical protein FLJ23309 | Hs.87128 |
| 209825_s_at | 514 | 2.62 | 1.18E−07 | 55.95% | 20.26% | UMPK | uridine monophosphate kinase | Hs.95734 |
| 217975_at | 24 | 2.60 | 3.93E−05 | 78.27% | 30.22% | LOC51186 | pp21 homolog | Hs.15984 |
| 217791_s_at | 697 | 2.60 | 3.00E−08 | 52.16% | 27.47% | PYCS | pyrroline-5-carboxylate | Hs.114366 |
| | | | | | | | synthetase (glutamate | |
| | | | | | | | gamma-semialdehyde | |
| | | | | | | | synthetase) | |
| 203662_s_at | 302 | 2.60 | 3.81E−03 | 115.58% | 96.82% | TMOD | tropomodulin | Hs.374849 |
| 208967_s_at | 481 | 2.59 | 1.23E−09 | 45.20% | 19.58% | AK2 | adenylate kinase 2 | Hs.294008 |
| 202371_at | 249 | 2.59 | 4.15E−06 | 67.51% | 23.93% | FLJ21174 | hypothetical protein FLJ21174 | Hs.194329 |
| 212055_at | 583 | 2.59 | 1.69E−06 | 63.82% | 35.39% | DKFZP586M1523 | DKFZP586M1523 protein | Hs.22981 |
| 200703_at | 161 | 2.58 | 6.22E−05 | 80.36% | 34.35% | PIN | dynein, cytoplasmic, light | Hs.5120 |
| | | | | | | | polypeptide | |
| 202262_x_at | 245 | 2.57 | 1.20E−07 | 55.38% | 30.08% | DDAH2 | dimethylarginine | Hs.247362 |
| | | | | | | | dimethylaminohydrolase 2 | |
| 209200_at | 487 | 2.56 | 5.08E−04 | 95.07% | 35.56% | MEF2C | MADS box transcription | Hs.78995 |
| | | | | | | | enhancer factor 2, polypeptide | |
| | | | | | | | C (myocyte enhancer factor | |
| | | | | | | | 2C) | |
| 213572_s_at | 632 | 2.56 | 6.00E−07 | 60.04% | 24.71% | SERPINB1 | serine (or cysteine) proteinase | Hs.183583 |
| | | | | | | | inhibitor, clade B (ovalbumin), | |
| | | | | | | | member 1 | |
| 210762_s_at | 548 | 2.56 | 1.07E−04 | 83.59% | 21.67% | DLC1 | deleted in liver cancer 1 | Hs.8700 |
| 200658_s_at | 159 | 2.56 | 1.37E−06 | 62.62% | 33.60% | PHB | prohibitin | Hs.75323 |
| 201325_s_at | 202 | 2.56 | 1.02E−03 | 101.41% | 34.91% | EMP1 | epithelial membrane protein 1 | Hs.79368 |
| 210999_s_at | 554 | 2.56 | 4.21E−06 | 67.09% | 10.66% | GRB10 | growth factor receptor-bound | Hs.81875 |
| | | | | | | | protein 10 | |
| 205518_s_at | 401 | 2.55 | 7.90E−09 | 48.51% | 21.91% | CMAH | cytidine monophosphate-N- | |
| | | | | | | | acetylneuraminic acid | |
| | | | | | | | hydroxylase (CMP-N- | |
| | | | | | | | acetylneuraminate | |
| | | | | | | | monooxygenase) | |
| 217809_at | 698 | 2.55 | 6.77E−09 | 48.13% | 20.59% | HSPC028 | HSPC028 protein | Hs.5216 |
| 210088_x_at | 526 | 2.54 | 1.55E−02 | 142.11% | 53.21% | MYL4 | myosin, light polypeptide 4, | Hs.433562 |
| | | | | | | | alkali; atrial, embryonic | |
| 220725_x_at | 785 | 2.54 | 1.18E−07 | 54.83% | 20.23% | FLJ23558 | hypothetical protein FLJ23558 | Hs.288552 |
| 208857_s_at | 472 | 2.54 | 7.84E−06 | 69.20% | 24.21% | PCMT1 | protein-L-isoaspartate (D- | Hs.79137 |
| | | | | | | | aspartate) O- | |
| | | | | | | | methyltransferase | |
| 210401_at | 536 | 2.53 | 1.55E−09 | 45.09% | 36.41% | P2RX1 | purinergic receptor P2X, | Hs.41735 |
| | | | | | | | ligand-gated ion channel, 1 | |
| 201555_at | 215 | 2.53 | 9.94E−06 | 70.17% | 23.11% | MCM3 | MCM3 minichromosome | Hs.179565 |
| | | | | | | | maintenance deficient 3 (S. cerevisiae) | |
| 202708_s_at | 260 | 2.53 | 1.43E−04 | 84.55% | 34.53% | H2BFQ | H2B histone family, member Q | Hs.2178 |
| 208651_x_at | 464 | 2.53 | 2.33E−02 | 151.82% | 55.28% | CD24 | CD24 antigen (small cell lung | Hs.375108 |
| | | | | | | | carcinoma cluster 4 antigen) | |
| 201951_at | 230 | 2.52 | 5.47E−05 | 78.34% | 35.71% | ALCAM | activated leucocyte cell | Hs.10247 |
| | | | | | | | adhesion molecule | |
| 201564_s_at | 218 | 2.52 | 9.43E−05 | 81.60% | 35.59% | SNL | singed-like (fascin homolog, | Hs.118400 |
| | | | | | | | sea urchin) (Drosophila) | |
| 220807_at | 787 | 2.51 | 1.86E−02 | 142.62% | 100.98% | HBQ1 | hemoglobin, theta 1 | Hs.247921 |
| 201005_at | 183 | 2.51 | 1.68E−03 | 104.10% | 68.43% | CD9 | CD9 antigen (p24) | Hs.1244 |
| 205801_s_at | 414 | 2.50 | 5.77E−03 | 121.93% | 35.56% | GRP3 | guanine nucleotide exchange | Hs.24024 |
| | | | | | | | factor for Rap1 | |
| 221521_s_at | 797 | 2.50 | 6.08E−03 | 123.19% | 14.58% | LOC51659 | HSPC037 protein | Hs.433180 |
| 208690_s_at | 467 | 2.50 | 5.11E−07 | 58.47% | 25.48% | PDLIM1 | PDZ and LIM domain 1 (elfin) | Hs.75807 |
| 201015_s_at | 184 | 2.48 | 1.26E−04 | 81.37% | 61.73% | JUP | junction plakoglobin | Hs.2340 |
| 203661_s_at | 301 | 2.47 | 4.13E−03 | 114.18% | 73.79% | TMOD | tropomodulin | Hs.374849 |
| 266_s_at | 814 | 2.46 | 3.21E−02 | 159.03% | 38.81% | CD24 | CD24 antigen (small cell lung | Hs.375108 |
| | | | | | | | carcinoma cluster 4 antigen) | |
| 209409_at | 496 | 2.46 | 2.57E−06 | 63.47% | 10.66% | GRB10 | growth factor receptor-bound | Hs.81875 |
| | | | | | | | protein 10 | |
| 203560_at | 299 | 2.46 | 1.44E−04 | 83.27% | 16.83% | GGH | gamma-glutamyl hydrolase | Hs.78619 |
| | | | | | | | (conjugase, | |
| | | | | | | | folylpolygammaglutamyl | |
| | | | | | | | hydrolase) | |
| 213170_at | 618 | 2.45 | 5.82E−10 | 42.28% | 21.81% | CL683 | weakly similar to glutathione | Hs.43728 |
| | | | | | | | peroxidase 2 | |
| 205227_at | 11 | 2.45 | 6.61E−05 | 77.91% | 32.30% | IL1RAP | interleukin 1 receptor | Hs.173880 |
| | | | | | | | accessory protein | |
| 218927_s_at | 747 | 2.44 | 1.69E−05 | 70.44% | 42.51% | C4S-2 | chondroitin 4-O- | Hs.25204 |
| | | | | | | | sulfotransferase 2 | |
| 209318_x_at | 492 | 2.44 | 7.63E−06 | 67.41% | 20.62% | PLAGL1 | pleiomorphic adenoma gene- | Hs.75825 |
| | | | | | | | like 1 | |
| 214106_s_at | 645 | 2.43 | 4.48E−03 | 116.13% | 23.65% | GMDS | GDP-mannose 4,6- | Hs.105435 |
| | | | | | | | dehydratase | |
| 213346_at | 623 | 2.43 | 8.55E−06 | 67.73% | 20.13% | LOC93081 | hypothetical protein BC015148 | Hs.13413 |
| 205418_at | 395 | 2.43 | 2.60E−04 | 86.33% | 37.54% | FES | feline sarcoma oncogene | Hs.7636 |
| 220051_at | 773 | 2.43 | 2.32E−02 | 148.56% | 15.25% | PRSS21 | protease, serine, 21 (testisin) | Hs.72026 |
| 202107_s_at | 239 | 2.43 | 8.20E−05 | 78.99% | 21.20% | MCM2 | MCM2 minichromosome | Hs.57101 |
| | | | | | | | maintenance deficient 2, | |
| | | | | | | | mitotin (S. cerevisiae) | |
| 202862_at | 271 | 2.42 | 3.03E−07 | 55.80% | 20.78% | FAH | fumarylacetoacetate hydrolase | Hs.73875 |
| | | | | | | | (fumarylacetoacetase) | |
| 204086_at | 327 | 2.42 | 4.35E−02 | 167.93% | 24.76% | PRAME | preferentially expressed | Hs.30743 |
| | | | | | | | antigen in melanoma | |
| 212526_at | 601 | 2.42 | 2.71E−06 | 62.96% | 7.37% | KIAA0610 | KIAA0610 protein | Hs.118087 |
| 210358_x_at | 533 | 2.42 | 1.91E−06 | 61.37% | 32.70% | GATA2, | GATA binding protein 2, | Hs.760 |
| | | | | | | MGC2306 | hypothetical protein MGC2306 | |
| 220615_s_at | 782 | 2.41 | 7.40E−04 | 94.63% | 30.22% | FLJ10462 | hypothetical protein FLJ10462 | Hs.100895 |
| 205612_at | 408 | 2.40 | 3.50E−02 | 159.14% | 23.65% | MMRN | multimerin | Hs.268107 |
| 200648_s_at | 158 | 2.39 | 5.01E−04 | 89.77% | 52.01% | GLUL | glutamate-ammonia ligase | Hs.170171 |
| | | | | | | | (glutamine synthase) | |
| 201277_s_at | 198 | 2.39 | 4.92E−06 | 64.59% | 19.32% | HNRPAB | heterogeneous nuclear | Hs.81361 |
| | | | | | | | ribonucleoprotein A/B | |
| 210044_s_at | 522 | 2.39 | 2.22E−09 | 43.75% | 45.66% | LYL1 | lymphoblastic leukemia | Hs.46446 |
| | | | | | | | derived sequence 1 | |
| 214501_s_at | 656 | 2.38 | 2.15E−08 | 48.45% | 21.49% | H2AFY | H2A histone family, member Y | Hs.75258 |
| 201240_s_at | 196 | 2.37 | 6.69E−07 | 56.91% | 36.63% | KIAA0102 | KIAA0102 gene product | Hs.77665 |
| 208626_s_at | 463 | 2.36 | 2.87E−08 | 48.71% | 24.12% | VATI | vesicle amine transport protein 1 | Hs.157236 |
| 205349_at | 393 | 2.35 | 2.52E−05 | 70.03% | 46.83% | GNA15 | guanine nucleotide binding | Hs.73797 |
| | | | | | | | protein (G protein), alpha 15 | |
| | | | | | | | (Gq class) | |
| 216833_x_at | 686 | 2.35 | 4.00E−04 | 87.94% | 12.86% | GYPB, | glycophorin B (includes Ss | Hs.372513 |
| | | | | | | GYPE | blood group), glycophorin E | |
| 218026_at | 707 | 2.34 | 5.33E−06 | 63.97% | 21.95% | HSPC009 | HSPC009 protein | Hs.16059 |
| 211464_x_at | 560 | 2.34 | 2.51E−06 | 60.85% | 35.12% | CASP6 | caspase 6, apoptosis-related | Hs.3280 |
| | | | | | | | cysteine protease | |
| 208677_s_at | 466 | 2.34 | 1.72E−08 | 47.26% | 31.21% | BSG | basigin (OK blood group) | Hs.74631 |
| 203744_at | 306 | 2.34 | 2.96E−13 | 31.01% | 19.36% | HMG4 | high-mobility group | Hs.19114 |
| | | | | | | | (nonhistone chromosomal) | |
| | | | | | | | protein 4 | |
| 212358_at | 596 | 2.34 | 2.49E−02 | 146.05% | 33.71% | CLIPR-59 | CLIP-170-related protein | Hs.7357 |
| 201036_s_at | 187 | 2.33 | 1.53E−05 | 68.07% | 19.36% | HADHSC | L-3-hydroxyacyl-Coenzyme A | Hs.8110 |
| | | | | | | | dehydrogenase, short chain | |
| 205600_x_at | 404 | 2.33 | 1.45E−07 | 51.99% | 32.81% | HOXB5 | homeo box B5 | Hs.22554 |
| 219007_at | 750 | 2.31 | 1.48E−05 | 67.23% | 30.35% | FLJ13287 | hypothetical protein FLJ13287 | Hs.53263 |
| 201069_at | 190 | 2.31 | 3.71E−03 | 109.02% | 24.70% | MMP2 | matrix metalloproteinase 2 | Hs.111301 |
| | | | | | | | (gelatinase A, 72 kD | |
| | | | | | | | gelatinase, 72 kD type IV | |
| | | | | | | | collagenase) | |
| 201231_s_at | 195 | 2.30 | 5.73E−10 | 40.37% | 18.11% | ENO1 | enolase 1, (alpha) | Hs.254105 |
| 218409_s_at | 724 | 2.29 | 1.56E−03 | 98.22% | 22.49% | DNAJL1 | hypothetical protein similar to | Hs.13015 |
| | | | | | | | mouse Dnajl1 | |
| 221471_at | 795 | 2.29 | 1.27E−08 | 45.85% | 23.06% | TDE1 | tumor differentially expressed 1 | Hs.272168 |
| 216705_s_at | 685 | 2.28 | 8.43E−07 | 56.23% | 28.91% | ADA | adenosine deaminase | Hs.1217 |
| 205601_s_at | 405 | 2.28 | 3.00E−05 | 70.06% | 24.09% | HOXB5 | homeo box B5 | Hs.22554 |
| 209208_at | 489 | 2.28 | 3.02E−07 | 53.16% | 28.79% | MPDU1 | mannose-P-dolichol utilization | Hs.6710 |
| | | | | | | | defect 1 | |
| 218188_s_at | 716 | 2.27 | 2.80E−08 | 47.33% | 21.04% | TIMM13 | translocase of inner | Hs.23410 |
| | | | | | | | mitochondrial membrane 13 | |
| | | | | | | | homolog (yeast) | |
| 200983_x_at | 182 | 2.27 | 8.67E−06 | 64.32% | 25.73% | CD59 | CD59 antigen p18-20 (antigen | Hs.278573 |
| | | | | | | | identified by monoclonal | |
| | | | | | | | antibodies 16.3A5, EJ16, | |
| | | | | | | | EJ30, EL32 and G344) | |
| 208964_s_at | 480 | 2.27 | 3.72E−10 | 39.28% | 19.16% | FADS1 | fatty acid desaturase 1 | Hs.132898 |
| 217274_x_at | 690 | 2.27 | 2.17E−03 | 99.73% | 56.76% | MYL4 | myosin, light polypeptide 4, | Hs.433562 |
| | | | | | | | alkali; atrial, embryonic | |
| 210365_at | 534 | 2.27 | 1.71E−05 | 66.55% | 41.85% | RUNX1 | runt-related transcription factor | Hs.129914 |
| | | | | | | | 1 (acute myeloid leukemia 1; | |
| | | | | | | | aml1 oncogene) | |
| 214455_at | 653 | 2.27 | 2.04E−03 | 100.36% | 21.81% | H2BFA, | H2B histone family, member | Hs.356901 |
| | | | | | | H2BFL | A, H2B histone family, | |
| | | | | | | | member L | |
| 220741_s_at | 786 | 2.27 | 1.33E−06 | 57.27% | 31.33% | SID6-306 | inorganic pyrophosphatase | Hs.375016 |
| 218585_s_at | 728 | 2.25 | 6.54E−04 | 88.37% | 35.75% | RAMP | RA-regulated nuclear matrix- | Hs.126774 |
| | | | | | | | associated protein | |
| 205608_s_at | 406 | 2.25 | 3.35E−08 | 47.27% | 23.20% | ANGPT1 | angiopoietin 1 | Hs.2463 |
| 205453_at | 397 | 2.24 | 9.34E−05 | 74.65% | 34.31% | HOXB2 | homeo box B2 | Hs.2733 |
| 201890_at | 228 | 2.24 | 5.28E−03 | 111.27% | 22.47% | RRM2 | ribonucleotide reductase M2 | Hs.75319 |
| | | | | | | | polypeptide | |
| 204386_s_at | 342 | 2.23 | 2.36E−07 | 51.76% | 22.35% | MRP63 | mitochondrial ribosomal | Hs.182695 |
| | | | | | | | protein 63 | |
| 210052_s_at | 523 | 2.23 | 9.78E−07 | 55.82% | 20.14% | C20orf1 | chromosome 20 open reading | Hs.9329 |
| | | | | | | | frame 1 | |
| 208898_at | 477 | 2.23 | 1.62E−07 | 50.69% | 23.80% | ATP6V1D | ATPase, H+ transporting, | Hs.272630 |
| | | | | | | | lysosomal 34 kD, V1 subunit D | |
| 200821_at | 170 | 2.22 | 5.72E−08 | 47.87% | 26.92% | LAMP2 | lysosomal-associated | Hs.8262 |
| | | | | | | | membrane protein 2 | |
| 207719_x_at | 455 | 2.21 | 2.09E−13 | 29.62% | 22.01% | KIAA0470 | KIAA0470 gene product | Hs.25132 |
| 204438_at | 21 | 2.21 | 2.04E−03 | 98.49% | 17.08% | MRC1 | mannose receptor, C type 1 | Hs.75182 |
| 209199_s_at | 486 | 2.21 | 5.25E−05 | 70.69% | 35.75% | MEF2C | MADS box transcription | Hs.78995 |
| | | | | | | | enhancer factor 2, polypeptide | |
| | | | | | | | C (myocyte enhancer factor | |
| | | | | | | | 2C) | |
| 214500_at | 655 | 2.21 | 5.45E−04 | 85.81% | 30.19% | H2AFY | H2A histone family, member Y | Hs.75258 |
| 201028_s_at | 186 | 2.21 | 3.32E−06 | 59.25% | 21.39% | MIC2 | antigen identified by | Hs.433387 |
| | | | | | | | monoclonal antibodies 12E7, | |
| | | | | | | | F21 and O13 | |
| 209395_at | 495 | 2.21 | 3.51E−02 | 148.36% | 52.07% | CHI3L1 | chitinase 3-like 1 (cartilage | Hs.75184 |
| | | | | | | | glycoprotein-39) | |
| 216554_s_at | 683 | 2.20 | 5.42E−13 | 30.22% | 18.05% | ENO1 | enolase 1, (alpha) | Hs.381397 |
| 222294_s_at | 812 | 2.20 | 2.12E−04 | 78.67% | 31.23% | | | Hs.432533 |
| 203688_at | 303 | 2.20 | 3.64E−06 | 59.34% | 25.67% | PKD2 | polycystic kidney disease 2 | Hs.82001 |
| | | | | | | | (autosomal dominant) | |
| 200728_at | 163 | 2.20 | 2.37E−12 | 32.00% | 25.79% | ACTR2 | ARP2 actin-related protein 2 | Hs.396278 |
| | | | | | | | homolog (yeast) | |
| 201562_s_at | 216 | 2.20 | 1.75E−14 | 27.69% | 29.44% | SORD | sorbitol dehydrogenase | Hs.878 |
| 211714_x_at | 567 | 2.19 | 5.66E−07 | 53.34% | 16.95% | FKBP1A | FK506 binding protein 1A | Hs.179661 |
| | | | | | | | (12 kD) | |
| 206057_x_at | 422 | 2.19 | 7.42E−12 | 33.11% | 25.12% | SPN | sialophorin (gpL115, | Hs.80738 |
| | | | | | | | leukosialin, CD43) | |
| 207761_s_at | 457 | 2.19 | 8.33E−06 | 62.25% | 19.69% | DKFZP586A0522 | DKFZP586A0522 protein | Hs.288771 |
| 200769_s_at | 165 | 2.18 | 1.09E−07 | 48.80% | 26.93% | MAT2A | methionine | Hs.77502 |
| | | | | | | | adenosyltransferase II, alpha | |
| 206665_s_at | 439 | 2.18 | 4.65E−03 | 106.39% | 44.14% | BCL2L1 | BCL2-like 1 | Hs.305890 |
| 208858_s_at | 473 | 2.17 | 2.26E−07 | 50.14% | 37.12% | KIAA0747 | KIAA0747 protein | Hs.8309 |
| 205239_at | 386 | 2.17 | 3.39E−02 | 144.04% | 72.62% | AREG | amphiregulin (schwannoma- | Hs.270833 |
| | | | | | | | derived growth factor) | |
| 205919_at | 419 | 2.17 | 4.72E−03 | 105.44% | 54.93% | HBE1 | hemoglobin, epsilon 1 | Hs.117848 |
| 203253_s_at | 288 | 2.17 | 1.36E−08 | 44.04% | 22.47% | KIAA0433 | KIAA0433 protein | Hs.26179 |
| 210549_s_at | 542 | 2.17 | 8.57E−04 | 88.61% | 0.00% | SCYA23 | small inducible cytokine | Hs.169191 |
| | | | | | | | subfamily A (Cys-Cys), | |
| | | | | | | | member 23 | |
| 201329_s_at | 203 | 2.16 | 5.35E−04 | 82.28% | 57.70% | ETS2 | v-ets erythroblastosis virus | Hs.85146 |
| | | | | | | | E26 oncogene homolog 2 | |
| | | | | | | | (avian) | |
| 204429_s_at | 348 | 2.16 | 1.40E−05 | 63.30% | 28.97% | SLC2A5 | solute carrier family 2 | Hs.33084 |
| | | | | | | | (facilitated glucose/fructose | |
| | | | | | | | transporter), member 5 | |
| 218136_s_at | 713 | 2.15 | 3.01E−02 | 137.41% | 93.36% | LOC51312 | mitochondrial solute carrier | Hs.283716 |
| 200806_s_at | 168 | 2.15 | 1.71E−06 | 55.72% | 20.60% | HSPD1 | heat shock 60 kD protein 1 | Hs.79037 |
| | | | | | | | (chaperonin) | |
| 212296_at | 594 | 2.15 | 9.97E−09 | 43.04% | 17.60% | POH1 | 26S proteasome-associated | Hs.178761 |
| | | | | | | | pad1 homolog | |
| 218160_at | 715 | 2.14 | 4.05E−06 | 58.42% | 24.57% | NDUFA8 | NADH dehydrogenase | Hs.31547 |
| | | | | | | | (ubiquinone) 1 alpha | |
| | | | | | | | subcomplex, 8 (19 kD, PGIV) | |
| 204039_at | 323 | 2.14 | 7.35E−04 | 85.48% | 36.46% | CEBPA | CCAAT/enhancer binding | Hs.76171 |
| | | | | | | | protein (C/EBP), alpha | |
| 200727_s_at | 162 | 2.14 | 4.97E−11 | 34.77% | 36.28% | ACTR2 | ARP2 actin-related protein 2 | Hs.393201 |
| | | | | | | | homolog (yeast) | |
| 48808_at | 823 | 2.13 | 4.23E−02 | 151.12% | 14.58% | DHFR | dihydrofolate reductase | Hs.83765 |
| 222037_at | 808 | 2.13 | 3.35E−04 | 79.27% | 35.71% | MCM4 | MCM4 minichromosome | Hs.319215 |
| | | | | | | | maintenance deficient 4 (S. cerevisiae) | |
| 202345_s_at | 248 | 2.13 | 8.72E−04 | 86.92% | 27.92% | FABP5 | fatty acid binding protein 5 | Hs.153179 |
| | | | | | | | (psoriasis-associated) | |
| 210036_s_at | 521 | 2.12 | 1.28E−03 | 90.00% | 31.48% | KCNH2 | potassium voltage-gated | Hs.188021 |
| | | | | | | | channel, subfamily H (eag- | |
| | | | | | | | related), member 2 | |
| 200812_at | 169 | 2.12 | 1.07E−05 | 61.36% | 26.73% | CCT7 | chaperonin containing TCP1, | Hs.108809 |
| | | | | | | | subunit 7 (eta) | |
| 202974_at | 277 | 2.12 | 2.27E−04 | 75.68% | 43.58% | MPP1 | membrane protein, | Hs.1861 |
| | | | | | | | palmitoylated 1 (55 kD) | |
| 201577_at | 221 | 2.11 | 1.31E−07 | 47.86% | 22.32% | NME1 | non-metastatic cells 1, protein | Hs.118638 |
| | | | | | | | (NM23A) expressed in | |
| 202201_at | 241 | 2.11 | 1.87E−03 | 92.07% | 49.52% | BLVRB | biliverdin reductase B (flavin | Hs.76289 |
| | | | | | | | reductase (NADPH)) | |
| 210849_s_at | 552 | 2.11 | 1.31E−10 | 35.54% | 31.11% | VPS41 | vacuolar protein sorting 41 | Hs.180941 |
| | | | | | | | (yeast) | |
| 209365_s_at | 494 | 2.10 | 3.90E−06 | 56.91% | 34.40% | ECM1 | extracellular matrix protein 1 | Hs.81071 |
| 217988_at | 705 | 2.10 | 8.48E−06 | 60.04% | 23.33% | HEI10 | enhancer of invasion 10 | Hs.107003 |
| 203904_x_at | 313 | 2.10 | 4.53E−08 | 45.10% | 27.01% | KAI1 | kangai 1 (suppression of | Hs.323949 |
| | | | | | | | tumorigenicity 6, prostate; | |
| | | | | | | | CD82 antigen (R2 leukocyte | |
| | | | | | | | antigen, antigen detected by | |
| | | | | | | | monoclonal and antibody IA4)) | |
| 200986_at | 35 | 2.09 | 1.08E−04 | 71.48% | 22.84% | SERPING1 | serine (or cysteine) proteinase | Hs.151242 |
| | | | | | | | inhibitor, clade G (C1 | |
| | | | | | | | inhibitor), member 1, | |
| | | | | | | | (angioedema, hereditary) | |
| 201491_at | 211 | 2.09 | 7.56E−06 | 59.51% | 18.40% | C14orf3 | chromosome 14 open reading | Hs.204041 |
| | | | | | | | frame 3 | |
| 200942_s_at | 178 | 2.09 | 1.47E−08 | 42.77% | 22.51% | HSBP1 | heat shock factor binding | Hs.250899 |
| | | | | | | | protein 1 | |
| 200973_s_at | 181 | 2.09 | 8.67E−08 | 46.27% | 30.93% | TSPAN-3 | tetraspan 3 | Hs.100090 |
| 207943_x_at | 459 | 2.09 | 2.78E−09 | 39.76% | 25.61% | PLAGL1 | pleiomorphic adenoma gene- | Hs.75825 |
| | | | | | | | like 1 | |
| 208899_x_at | 478 | 2.09 | 3.61E−09 | 40.15% | 27.32% | ATP6V1D | ATPase, H+ transporting, | Hs.272630 |
| | | | | | | | lysosomal 34 kD, V1 subunit D | |
| 204187_at | 334 | 2.09 | 3.03E−02 | 133.16% | 94.60% | GMPR | guanosine monophosphate | Hs.1435 |
| | | | | | | | reductase | |
| 220240_s_at | 777 | 2.08 | 2.48E−07 | 48.85% | 18.46% | FLJ20623 | hypothetical protein FLJ20623 | Hs.27337 |
| 218966_at | 749 | 2.08 | 3.83E−05 | 65.76% | 27.14% | MYO5C | myosin 5C | Hs.111782 |
| 214321_at | 649 | 2.07 | 4.28E−02 | 146.79% | 35.71% | NOV | nephroblastoma | Hs.235935 |
| | | | | | | | overexpressed gene | |
| 211769_x_at | 570 | 2.07 | 2.26E−09 | 39.09% | 24.73% | TDE1 | tumor differentially expressed 1 | Hs.272168 |
| 202990_at | 279 | 2.07 | 1.72E−04 | 73.21% | 26.24% | PYGL | phosphorylase, glycogen; liver | Hs.771 |
| | | | | | | | (Hers disease, glycogen | |
| | | | | | | | storage disease type VI) | |
| 202429_s_at | 251 | 2.06 | 5.39E−06 | 57.32% | 26.50% | PPP3CA | protein phosphatase 3 | Hs.272458 |
| | | | | | | | (formerly 2B), catalytic subunit, | |
| | | | | | | | alpha isoform (calcineurin A | |
| | | | | | | | alpha) | |
| 209215_at | 490 | 2.06 | 2.44E−05 | 62.66% | 37.86% | TETRAN | tetracycline transporter-like | Hs.157145 |
| | | | | | | | protein | |
| 217949_s_at | 703 | 2.06 | 9.23E−06 | 59.41% | 20.57% | IMAGE3455200 | hypothetical protein | Hs.324844 |
| | | | | | | | IMAGE3455200 | |
| 205330_at | 392 | 2.06 | 9.95E−03 | 112.06% | 45.65% | MN1 | meningioma (disrupted in | Hs.268515 |
| | | | | | | | balanced translocation) 1 | |
| 218027_at | 708 | 2.06 | 7.08E−08 | 45.38% | 19.16% | MRPL15 | mitochondrial ribosomal | Hs.18349 |
| | | | | | | | protein L15 | |
| 219479_at | 761 | 2.06 | 6.63E−04 | 82.11% | 23.65% | MGC5302 | endoplasmic reticulum | Hs.44970 |
| | | | | | | | resident protein 58; | |
| | | | | | | | hypothetical protein MGC5302 | |
| 215416_s_at | 671 | 2.06 | 1.08E−10 | 34.37% | 18.21% | STOML2 | stomatin (EPB72)-like 2 | Hs.3439 |
| 221479_s_at | 796 | 2.06 | 9.03E−03 | 110.65% | 34.64% | BNIP3L | BCL2/adenovirus E1B 19 kD | Hs.132955 |
| | | | | | | | interacting protein 3-like | |
| 215285_s_at | 669 | 2.05 | 1.83E−03 | 90.98% | 18.13% | PHTF1 | putative homeodomain | Hs.123637 |
| | | | | | | | transcription factor 1 | |
| 219559_at | 763 | 2.05 | 9.10E−10 | 37.29% | 24.99% | C20orf59 | chromosome 20 open reading | Hs.353013 |
| | | | | | | | frame 59 | |
| 211342_x_at | 557 | 2.05 | 4.07E−08 | 42.42% | 51.95% | TNRC11 | trinucleotide repeat containing | Hs.211607 |
| | | | | | | | 11 (THR-associated protein, | |
| | | | | | | | 230 kD subunit) | |
| 210298_x_at | 71 | 2.05 | 4.94E−03 | 101.70% | 26.72% | FHL1 | four and a half LIM domains 1 | Hs.239069 |
| 217724_at | 694 | 2.04 | 6.51E−07 | 50.51% | 16.73% | PAI-RBP1 | PAI-1 mRNA-binding protein | Hs.165998 |
| 208817_at | 471 | 2.04 | 1.23E−08 | 41.49% | 24.81% | COMT | catechol-O-methyltransferase | Hs.240013 |
| 204040_at | 324 | 2.04 | 1.37E−05 | 60.01% | 30.27% | KIAA0161 | KIAA0161 gene product | Hs.78894 |
| 213854_at | 639 | 2.04 | 4.56E−07 | 49.43% | 20.27% | SYNGR1 | synaptogyrin 1 | Hs.6139 |
| 200729_s_at | 164 | 2.04 | 1.28E−11 | 31.75% | 24.98% | ACTR2 | ARP2 actin-related protein 2 | Hs.393201 |
| | | | | | | | homolog (yeast) | |
| 201970_s_at | 232 | 2.04 | 3.64E−04 | 76.63% | 31.58% | NASP | nuclear autoantigenic sperm | Hs.380400 |
| | | | | | | | protein (histone-binding) | |
| 203021_at | 280 | 2.03 | 3.92E−04 | 76.95% | 33.19% | SLPI | secretory leukocyte protease | Hs.251754 |
| | | | | | | | inhibitor (antileukoproteinase) | |
| 200900_s_at | 175 | 2.03 | 8.48E−06 | 58.01% | 25.64% | M6PR | mannose-6-phosphate | Hs.134084 |
| | | | | | | | receptor (cation dependent) | |
| 203800_s_at | 308 | 2.03 | 7.24E−07 | 50.35% | 21.68% | MRPS14 | mitochondrial ribosomal | Hs.247324 |
| | | | | | | | protein S14 | |
| 212320_at | 595 | 2.02 | 2.59E−07 | 47.68% | 15.36% | | | Hs.179661 |
| 217892_s_at | 701 | 2.02 | 1.64E−10 | 34.53% | 25.93% | ARL4, | ADP-ribosylation factor-like 4, | Hs.10706 |
| | | | | | | EPLIN | epithelial protein lost in | |
| | | | | | | | neoplasm beta | |
| 218270_at | 719 | 2.02 | 2.16E−05 | 61.02% | 34.29% | MRPL24 | mitochondrial ribosomal | Hs.9265 |
| | | | | | | | protein L24 | |
| 201302_at | 199 | 2.02 | 1.45E−05 | 59.43% | 31.19% | ANXA4 | annexin A4 | Hs.77840 |
| 214113_s_at | 61 | 2.02 | 4.98E−06 | 56.07% | 12.21% | RBM8A | RNA binding motif protein 8A | Hs.10283 |
| 206438_x_at | 434 | 2.01 | 2.03E−11 | 31.90% | 26.02% | FLJ12975 | hypothetical protein FLJ12975 | Hs.167165 |
| 205505_at | 399 | 2.01 | 1.77E−05 | 60.46% | 21.22% | GCNT1 | glucosaminyl (N-acetyl) | Hs.159642 |
| | | | | | | | transferase 1, core 2 (beta- | |
| | | | | | | | 1,6-N- | |
| | | | | | | | acetylglucosaminyltransferase) | |
| 209515_s_at | 499 | 2.01 | 6.79E−05 | 66.13% | 27.14% | RAB27A | RAB27A, member RAS | Hs.50477 |
| | | | | | | | oncogene family | |
| 221831_at | 802 | 2.01 | 1.72E−04 | 69.36% | 52.04% | | | Hs.348515 |
| 221942_s_at | 806 | 2.01 | 1.14E−07 | 44.95% | 33.24% | GUCY1A3 | guanylate cyclase 1, soluble, | Hs.75295 |
| | | | | | | | alpha 3 | |
| 213797_at | 101 | 2.01 | 4.76E−04 | 77.51% | 26.86% | cig5 | vipirin | Hs.17518 |
| 209517_s_at | 500 | 2.00 | 4.18E−09 | 38.85% | 19.12% | ASH2L | ash2 (absent, small, or | Hs.6856 |
| | | | | | | | homeotic)-like (Drosophila) | |
| 213617_s_at | 634 | 2.00 | 2.38E−09 | 37.89% | 23.87% | DKFZP586M1523 | DKFZP586M1523 protein | Hs.22981 |
| 214390_s_at | 650 | 2.00 | 1.54E−02 | 116.91% | 34.44% | BCAT1 | branched chain | Hs.317432 |
| | | | | | | | aminotransferase 1, cytosolic | |
| 219423_x_at | 760 | 0.50 | 8.47E−11 | 61.84% | 27.11% | TNFRSF12 | tumor necrosis factor receptor | Hs.180338 |
| | | | | | | | superfamily, member 12 | |
| | | | | | | | (translocating chain- | |
| | | | | | | | association membrane protein) | |
| 35626_at | 816 | 0.50 | 1.86E−06 | 91.46% | 39.11% | SGSH | N-sulfoglucosamine | Hs.31074 |
| | | | | | | | sulfohydrolase (sulfamidase) | |
| 211984_at | 581 | 0.50 | 2.35E−15 | 48.17% | 17.35% | | | Hs.374441 |
| 200965_s_at | 180 | 0.50 | 6.00E−07 | 96.72% | 24.80% | ABLIM | actin binding LIM protein | Hs.158203 |
| 201531_at | 214 | 0.50 | 7.92E−11 | 59.64% | 30.26% | ZFP36 | zinc finger protein 36, C3H | Hs.343586 |
| | | | | | | | type, homolog (mouse) | |
| 205022_s_at | 379 | 0.49 | 3.82E−12 | 26.84% | 36.11% | CHES1 | checkpoint suppressor 1 | Hs.211773 |
| 207697_x_at | 454 | 0.49 | 3.04E−09 | 78.11% | 19.85% | LILRB1, | leukocyte immunoglobulin-like | Hs.22405 |
| | | | | | | LILRB2 | receptor, subfamily B (with TM | |
| | | | | | | | and ITIM domains), member 1, | |
| | | | | | | | leukocyte immunoglobulin-like | |
| | | | | | | | receptor, subfamily B (with TM | |
| | | | | | | | and ITIM domains), member 2 | |
| 205019_s_at | 378 | 0.49 | 1.92E−10 | 62.69% | 30.88% | VIPR1 | vasoactive intestinal peptide | Hs.348500 |
| | | | | | | | receptor 1 | |
| 210845_s_at | 551 | 0.49 | 1.37E−07 | 66.07% | 46.38% | PLAUR | plasminogen activator, | Hs.179657 |
| | | | | | | | urokinase receptor | |
| 213831_at | 637 | 0.49 | 1.63E−03 | 90.56% | 91.29% | HLA-DQA1 | major histocompatibility | Hs.198253 |
| | | | | | | | complex, class II, DQ alpha 1 | |
| 203341_at | 292 | 0.49 | 6.80E−17 | 34.29% | 25.70% | CBF2 | CCAAT-box-binding | Hs.184760 |
| | | | | | | | transcription factor | |
| 209657_s_at | 506 | 0.49 | 6.13E−14 | 51.61% | 24.06% | HSF2 | heat shock transcription factor 2 | Hs.158195 |
| 220684_at | 784 | 0.49 | 7.01E−09 | 71.86% | 34.98% | TBX21 | T-box 21 | Hs.272409 |
| 211924_s_at | 577 | 0.49 | 4.60E−05 | 82.81% | 65.29% | PLAUR | plasminogen activator, | Hs.179657 |
| | | | | | | | urokinase receptor | |
| 32032_at | 815 | 0.49 | 5.45E−18 | 33.09% | 24.48% | DGSI | DiGeorge syndrome critical | Hs.154879 |
| | | | | | | | region gene DGSI; likely | |
| | | | | | | | ortholog of mouse expressed | |
| | | | | | | | sequence 2 embryonic lethal | |
| 212914_at | 610 | 0.49 | 6.70E−09 | 76.90% | 30.67% | PKP4 | plakophilin 4 | Hs.356416 |
| 204847_at | 370 | 0.49 | 2.64E−20 | 37.08% | 18.34% | ZNF- | zinc finger protein | Hs.301956 |
| | | | | | | U69274 | | |
| 218559_s_at | 727 | 0.49 | 3.58E−03 | 191.41% | 42.94% | MAFB | v-maf musculoaponeurotic | Hs.169487 |
| | | | | | | | fibrosarcoma oncogene | |
| | | | | | | | homolog B (avian) | |
| 213587_s_at | 633 | 0.49 | 5.00E−10 | 60.46% | 35.98% | | | Hs.351612 |
| 203547_at | 297 | 0.48 | 8.38E−13 | 57.70% | 24.56% | CD4 | CD4 antigen (p55) | Hs.17483 |
| 214696_at | 662 | 0.48 | 1.43E−08 | 82.10% | 29.38% | MGC14376 | hypothetical protein | Hs.417157 |
| | | | | | | | MGC14376 | |
| 220088_at | 775 | 0.48 | 1.73E−04 | 116.92% | 60.98% | C5R1 | complement component 5 | Hs.2161 |
| | | | | | | | receptor 1 (C5a ligand) | |
| 202724_s_at | 262 | 0.48 | 5.23E−11 | 63.15% | 29.60% | FOXO1A | forkhead box O1A | Hs.170133 |
| | | | | | | | (rhabdomyosarcoma) | |
| 200788_s_at | 166 | 0.48 | 1.43E−12 | 61.50% | 19.94% | PEA15 | phosphoprotein enriched in | Hs.194673 |
| | | | | | | | astrocytes 15 | |
| 213376_at | 626 | 0.48 | 1.04E−14 | 49.81% | 24.43% | | | Hs.372699 |
| 204621_s_at | 357 | 0.48 | 1.11E−08 | 79.04% | 32.70% | NR4A2 | nuclear receptor subfamily 4, | Hs.82120 |
| | | | | | | | group A, member 2 | |
| 214945_at | 664 | 0.48 | 3.42E−07 | 63.69% | 51.89% | KIAA0752 | KIAA0752 protein | Hs.126779 |
| 221757_at | 801 | 0.48 | 5.42E−11 | 69.15% | 23.27% | MGC17330 | hypothetical protein | Hs.26670 |
| | | | | | | | MGC17330 | |
| 211985_s_at | 582 | 0.48 | 3.30E−12 | 62.39% | 23.79% | | | Hs.374441 |
| 200871_s_at | 174 | 0.48 | 1.63E−09 | 81.31% | 16.45% | PSAP | prosaposin (variant Gaucher | Hs.406455 |
| | | | | | | | disease and variant | |
| | | | | | | | metachromatic | |
| | | | | | | | leukodystrophy) | |
| 202842_s_at | 267 | 0.48 | 2.16E−14 | 52.79% | 23.79% | DNAJB9 | DnaJ (Hsp40) homolog, | Hs.6790 |
| | | | | | | | subfamily B, member 9 | |
| 219155_at | 756 | 0.48 | 8.61E−16 | 47.62% | 23.40% | RDGBB | retinal degeneration B beta | Hs.333212 |
| 203234_at | 287 | 0.48 | 2.03E−07 | 89.59% | 37.67% | UP | uridine phosphorylase | Hs.77573 |
| 219040_at | 752 | 0.48 | 6.47E−10 | 42.85% | 43.00% | FLJ22021 | hypothetical protein FLJ22021 | Hs.7258 |
| 214714_at | 663 | 0.48 | 2.31E−17 | 47.52% | 14.02% | FLJ12298 | hypothetical protein FLJ12298 | Hs.284168 |
| 219279_at | 758 | 0.47 | 4.42E−11 | 68.97% | 25.55% | FLJ20220 | hypothetical protein FLJ20220 | Hs.21126 |
| 40420_at | 822 | 0.47 | 4.30E−19 | 39.97% | 20.91% | STK10 | serine/threonine kinase 10 | Hs.16134 |
| 214467_at | 96 | 0.47 | 8.57E−09 | 86.65% | 24.10% | GPR65 | G protein-coupled receptor 65 | Hs.131924 |
| 202518_at | 256 | 0.47 | 4.27E−19 | 42.88% | 17.86% | BCL7B | B-cell CLL/lymphoma 7B | Hs.16269 |
| 204224_s_at | 338 | 0.47 | 4.35E−15 | 53.97% | 19.72% | GCH1 | GTP cyclohydrolase 1 (dopa- | Hs.86724 |
| | | | | | | | responsive dystonia) | |
| 203045_at | 281 | 0.47 | 3.33E−07 | 92.08% | 40.13% | NINJ1 | ninjurin 1 | Hs.11342 |
| 39582_at | 821 | 0.47 | 1.97E−11 | 70.10% | 20.79% | | | Hs.26295 |
| 210225_x_at | 529 | 0.47 | 3.53E−07 | 98.45% | 34.82% | LILRB3 | leukocyte immunoglobulin-like | Hs.105928 |
| | | | | | | | receptor, subfamily B (with TM | |
| | | | | | | | and ITIM domains), member 3 | |
| 204891_s_at | 374 | 0.47 | 5.17E−05 | 128.95% | 45.60% | LCK | lymphocyte-specific protein | Hs.1765 |
| | | | | | | | tyrosine kinase | |
| 218711_s_at | 733 | 0.47 | 1.60E−12 | 34.72% | 36.28% | SDPR | serum deprivation response | Hs.26530 |
| | | | | | | | (phosphatidylserine binding | |
| | | | | | | | protein) | |
| 205254_x_at | 388 | 0.47 | 4.07E−07 | 104.29% | 28.42% | TCF7 | transcription factor 7 (T-cell | Hs.169294 |
| | | | | | | | specific, HMG-box) | |
| 204396_s_at | 344 | 0.47 | 4.98E−11 | 72.12% | 23.82% | GPRK5 | G protein-coupled receptor | Hs.211569 |
| | | | | | | | kinase 5 | |
| 204369_at | 341 | 0.47 | 1.47E−14 | 47.33% | 28.81% | PIK3CA | phosphoinositide-3-kinase, | Hs.85701 |
| | | | | | | | catalytic, alpha polypeptide | |
| 212998_x_at | 611 | 0.47 | 3.46E−09 | 72.57% | 38.15% | HLA-DQB1 | major histocompatibility | Hs.73931 |
| | | | | | | | complex, class II, DQ beta 1 | |
| 204588_s_at | 354 | 0.47 | 1.36E−06 | 111.56% | 31.06% | SLC7A7 | solute carrier family 7 (cationic | Hs.194693 |
| | | | | | | | amino acid transporter, y+ | |
| | | | | | | | system), member 7 | |
| 208881_x_at | 475 | 0.47 | 2.85E−21 | 33.87% | 21.20% | IDI1 | isopentenyl-diphosphate delta | Hs.76038 |
| | | | | | | | isomerase | |
| 202861_at | 270 | 0.47 | 1.34E−08 | 76.10% | 40.36% | PER1 | period homolog 1 (Drosophila) | Hs.68398 |
| 218828_at | 739 | 0.46 | 5.31E−06 | 70.98% | 62.75% | PLSCR3 | phospholipid scramblase 3 | Hs.103382 |
| 202388_at | 250 | 0.46 | 2.71E−11 | 71.26% | 25.16% | RGS2 | regulator of G-protein | Hs.78944 |
| | | | | | | | signalling 2, 24 kD | |
| 219118_at | 755 | 0.46 | 4.33E−09 | 60.48% | 44.50% | FKBP11 | FK506 binding protein 11 (19 kDa) | Hs.24048 |
| 213906_at | 640 | 0.46 | 2.86E−06 | 109.54% | 42.47% | MYBL1 | v-myb myeloblastosis viral | Hs.300592 |
| | | | | | | | oncogene homolog (avian)-like 1 | |
| 202880_s_at | 273 | 0.46 | 9.28E−17 | 51.09% | 19.25% | PSCD1 | pleckstrin homology, Sec7 and | Hs.1050 |
| | | | | | | | coiled/coil domains | |
| | | | | | | | 1(cytohesin 1) | |
| 201631_s_at | 223 | 0.46 | 2.35E−04 | 129.87% | 65.59% | IER3 | immediate early response 3 | Hs.76095 |
| 213758_at | 635 | 0.46 | 1.89E−14 | 53.82% | 26.63% | | | Hs.373513 |
| 209616_s_at | 505 | 0.46 | 1.05E−06 | 93.94% | 48.20% | CES1 | carboxylesterase 1 | Hs.76688 |
| | | | | | | | (monocyte/macrophage serine | |
| | | | | | | | esterase 1) | |
| 205281_s_at | 390 | 0.46 | 1.44E−16 | 51.93% | 20.24% | PIGA | phosphatidylinositol glycan, | Hs.51 |
| | | | | | | | class A (paroxysmal nocturnal | |
| | | | | | | | hemoglobinuria) | |
| 204215_at | 337 | 0.46 | 1.33E−13 | 57.29% | 27.83% | MGC4175 | hypothetical protein MGC4175 | Hs.322404 |
| 212812_at | 98 | 0.46 | 6.01E−10 | 72.92% | 35.84% | | | Hs.288232 |
| 207826_s_at | 458 | 0.45 | 2.92E−06 | 63.43% | 63.90% | ID3 | inhibitor of DNA binding 3, | Hs.76884 |
| | | | | | | | dominant negative helix-loop- | |
| | | | | | | | helix protein | |
| 202072_at | 237 | 0.45 | 5.57E−04 | 111.63% | 84.78% | HNRPL | heterogeneous nuclear | Hs.2730 |
| | | | | | | | ribonucleoprotein L | |
| 210439_at | 538 | 0.45 | 2.90E−06 | 112.93% | 44.33% | ICOS | inducible T-cell co-stimulator | Hs.56247 |
| 203320_at | 290 | 0.45 | 3.65E−15 | 55.50% | 24.57% | LNK | lymphocyte adaptor protein | Hs.13131 |
| 204440_at | 349 | 0.45 | 1.79E−10 | 68.74% | 36.26% | CD83 | CD83 antigen (activated B | Hs.79197 |
| | | | | | | | lymphocytes, immunoglobulin | |
| | | | | | | | superfamily) | |
| 211458_s_at | 559 | 0.45 | 1.95E−10 | 69.84% | 35.88% | GABARAPL3 | GABA(A) receptors associated | Hs.334497 |
| | | | | | | | protein like 3 | |
| 212769_at | 608 | 0.45 | 1.48E−10 | 56.88% | 40.54% | TLE3 | transducin-like enhancer of | Hs.287362 |
| | | | | | | | split 3 (E(sp1) homolog, | |
| | | | | | | | Drosophila) | |
| 221841_s_at | 803 | 0.45 | 9.97E−06 | 134.32% | 33.96% | KLF4 | Kruppel-like factor 4 (gut) | Hs.376206 |
| 217784_at | 696 | 0.45 | 1.90E−12 | 60.94% | 31.98% | YKT6 | SNARE protein Ykt6 | Hs.296244 |
| 202782_s_at | 265 | 0.45 | 2.24E−14 | 51.88% | 30.16% | SKIP | skeletal muscle and kidney | Hs.178347 |
| | | | | | | | enriched inositol phosphatase | |
| 220987_s_at | 94 | 0.45 | 9.43E−16 | 56.70% | 21.86% | DKFZP434J037 | hypothetical protein | Hs.172012 |
| | | | | | | | DKFZp434J037 | |
| 218708_at | 732 | 0.45 | 2.34E−14 | 39.15% | 33.34% | NXT1 | NTF2-like export factor 1 | Hs.24563 |
| 215785_s_at | 674 | 0.45 | 6.95E−10 | 68.97% | 40.16% | CYFIP2 | cytoplasmic FMR1 interacting | Hs.258503 |
| | | | | | | | protein 2 | |
| 202969_at | 276 | 0.45 | 2.29E−16 | 49.47% | 26.00% | | | Hs.432856 |
| 207000_s_at | 445 | 0.45 | 1.12E−13 | 66.37% | 20.02% | PPP3CC | protein phosphatase 3 | Hs.75206 |
| | | | | | | | (formerly 2B), catalytic subunit, | |
| | | | | | | | gamma isoform (calcineurin A | |
| | | | | | | | gamma) | |
| 203555_at | 298 | 0.45 | 2.68E−15 | 46.47% | 29.83% | PTPN18 | protein tyrosine phosphatase, | Hs.278597 |
| | | | | | | | non-receptor type 18 (brain- | |
| | | | | | | | derived) | |
| 202928_s_at | 274 | 0.45 | 6.61E−13 | 54.32% | 33.85% | PHF1 | PHD finger protein 1 | Hs.166204 |
| 204627_s_at | 359 | 0.45 | 4.89E−05 | 142.91% | 47.23% | ITGB3 | integrin, beta 3 (platelet | Hs.87149 |
| | | | | | | | glycoprotein IIIa, antigen | |
| | | | | | | | CD61) | |
| 209674_at | 508 | 0.44 | 4.83E−10 | 74.94% | 36.71% | CRY1 | cryptochrome 1 (photolyase- | Hs.151573 |
| | | | | | | | like) | |
| 204158_s_at | 332 | 0.44 | 2.24E−09 | 60.61% | 45.60% | TCIRG1 | T-cell, immune regulator 1, | Hs.46465 |
| | | | | | | | ATPase, H+ transporting, | |
| | | | | | | | lysosomal V0 protein a isoform 3 | |
| 204731_at | 362 | 0.44 | 3.88E−08 | 89.75% | 41.63% | TGFBR3 | transforming growth factor, | Hs.342874 |
| | | | | | | | beta receptor III (betaglycan, | |
| | | | | | | | 300 kD) | |
| 222315_at | 813 | 0.44 | 1.83E−08 | 61.85% | 50.17% | | | Hs.292853 |
| 214617_at | 659 | 0.44 | 3.89E−05 | 132.11% | 54.52% | PRF1 | perforin 1 (pore forming | Hs.411106 |
| | | | | | | | protein) | |
| 211429_s_at | 558 | 0.44 | 1.47E−08 | 99.17% | 28.25% | SERPINA1 | serine (or cysteine) proteinase | Hs.297681 |
| | | | | | | | inhibitor, clade A (alpha-1 | |
| | | | | | | | antiproteinase, antitrypsin), | |
| | | | | | | | member 1 | |
| 211919_s_at | 575 | 0.44 | 1.78E−13 | 66.91% | 23.29% | CXCR4 | chemokine (C—X—C motif), | Hs.89414 |
| | | | | | | | receptor 4 (fusin) | |
| 212508_at | 600 | 0.44 | 2.82E−20 | 45.20% | 19.28% | MAP-1 | modulator of apoptosis 1 | Hs.24719 |
| 213193_x_at | 111 | 0.44 | 7.58E−07 | 118.46% | 35.66% | TRB@ | T cell receptor beta locus | Hs.303157 |
| 215275_at | 108 | 0.44 | 8.07E−11 | 85.22% | 17.38% | | | |
| 205070_at | 381 | 0.44 | 1.03E−13 | 42.45% | 35.11% | ING3 | inhibitor of growth family, | Hs.143198 |
| | | | | | | | member 3 | |
| 220890_s_at | 788 | 0.44 | 6.68E−25 | 36.96% | 16.82% | LOC51202 | hqp0256 protein | Hs.284288 |
| 210606_x_at | 543 | 0.44 | 1.80E−08 | 92.09% | 39.34% | KLRD1 | killer cell lectin-like receptor | Hs.41682 |
| | | | | | | | subfamily D, member 1 | |
| 204491_at | 352 | 0.44 | 9.84E−15 | 57.70% | 27.77% | PDE4D | phosphodiesterase 4D, cAMP- | Hs.172081 |
| | | | | | | | specific (phosphodiesterase | |
| | | | | | | | E3 dunce homolog, | |
| | | | | | | | Drosophila) | |
| 220066_at | 774 | 0.44 | 2.04E−10 | 77.28% | 35.18% | CARD15 | caspase recruitment domain | Hs.135201 |
| | | | | | | | family, member 15 | |
| 218964_at | 748 | 0.44 | 1.85E−15 | 43.77% | 31.13% | DRIL2 | dead ringer (Drosophila)-like 2 | Hs.10431 |
| | | | | | | | (bright and dead ringer) | |
| 204019_s_at | 320 | 0.44 | 2.32E−07 | 96.30% | 47.51% | DKFZP586F1318 | hypothetical protein | Hs.432325 |
| | | | | | | | DKFZP586F1318 | |
| 212400_at | 597 | 0.43 | 1.01E−10 | 83.88% | 27.30% | | | Hs.349755 |
| 219947_at | 771 | 0.43 | 2.91E−09 | 85.16% | 39.01% | CLECSF6 | C-type (calcium dependent, | Hs.115515 |
| | | | | | | | carbohydrate-recognition | |
| | | | | | | | domain) lectin, superfamily | |
| | | | | | | | member 6 | |
| 204912_at | 114 | 0.43 | 2.36E−13 | 71.20% | 22.28% | IL10RA | interleukin 10 receptor, alpha | Hs.327 |
| 204951_at | 377 | 0.43 | 6.62E−13 | 68.70% | 29.59% | ARHH | ras homolog gene family, | Hs.109918 |
| | | | | | | | member H | |
| 214049_x_at | 644 | 0.43 | 7.17E−11 | 78.15% | 33.94% | CD7 | CD7 antigen (p41) | Hs.36972 |
| 218831_s_at | 740 | 0.43 | 7.63E−09 | 101.10% | 30.44% | FCGRT | Fc fragment of IgG, receptor, | Hs.111903 |
| | | | | | | | transporter, alpha | |
| 205992_s_at | 421 | 0.43 | 4.36E−14 | 40.54% | 35.31% | IL15 | interleukin 15 | Hs.168132 |
| 60084_at | 824 | 0.43 | 4.04E−19 | 48.64% | 22.69% | CYLD | cylindromatosis (turban tumor | Hs.18827 |
| | | | | | | | syndrome) | |
| 207460_at | 452 | 0.42 | 3.62E−14 | 59.33% | 30.98% | GZMM | granzyme M (lymphocyte metase | Hs.268531 |
| | | | | | | | 1) | |
| 215666_at | 673 | 0.42 | 2.16E−03 | 118.92% | 106.86% | HLA-DRB4 | major histocompatibility | Hs.318720 |
| | | | | | | | complex, class II, DR beta 4 | |
| 217838_s_at | 699 | 0.42 | 3.55E−09 | 98.35% | 32.55% | RNB6 | RNB6 | Hs.241471 |
| 202833_s_at | 266 | 0.42 | 3.54E−08 | 110.50% | 32.29% | SERPINA1 | serine (or cysteine) proteinase | Hs.297681 |
| | | | | | | | inhibitor, clade A (alpha-1 | |
| | | | | | | | antiproteinase, antitrypsin), | |
| | | | | | | | member 1 | |
| 210915_x_at | 553 | 0.42 | 1.97E−06 | 135.65% | 35.59% | TRB@ | T cell receptor beta locus | Hs.303157 |
| 207339_s_at | 449 | 0.42 | 1.22E−06 | 126.75% | 42.23% | LTB | lymphotoxin beta (TNF | Hs.890 |
| | | | | | | | superfamily, member 3) | |
| 221724_s_at | 117 | 0.42 | 1.32E−10 | 85.44% | 33.28% | CLECSF6 | C-type (calcium dependent, | Hs.115515 |
| | | | | | | | carbohydrate-recognition | |
| | | | | | | | domain) lectin, superfamily | |
| | | | | | | | member 6 | |
| 221059_s_at | 793 | 0.42 | 6.90E−15 | 68.88% | 20.17% | CHST6 | carbohydrate (N- | Hs.157439 |
| | | | | | | | acetylglucosamine 6-O) | |
| | | | | | | | sulfotransferase 6 | |
| 209201_x_at | 488 | 0.42 | 1.63E−15 | 65.60% | 21.71% | CXCR4 | chemokine (C—X—C motif), | Hs.89414 |
| | | | | | | | receptor 4 (fusin) | |
| 212501_at | 599 | 0.42 | 8.81E−12 | 84.93% | 22.86% | CEBPB | CCAAT/enhancer binding | Hs.99029 |
| | | | | | | | protein (C/EBP), beta | |
| 201739_at | 123 | 0.42 | 1.15E−07 | 102.88% | 46.70% | SGK | serum/glucocorticoid regulated | Hs.296323 |
| | | | | | | | kinase | |
| 207072_at | 446 | 0.42 | 9.05E−10 | 77.08% | 43.43% | IL18RAP | interleukin 18 receptor | Hs.158315 |
| | | | | | | | accessory protein | |
| 200920_s_at | 176 | 0.42 | 1.24E−10 | 72.36% | 40.91% | BTG1 | B-cell translocation gene 1, | Hs.77054 |
| | | | | | | | anti-proliferative | |
| 203334_at | 291 | 0.41 | 9.88E−18 | 53.89% | 25.03% | DDX8 | DEAD/H (Asp-Glu-Ala- | Hs.171872 |
| | | | | | | | Asp/His) box polypeptide 8 | |
| | | | | | | | (RNA helicase) | |
| 204622_x_at | 358 | 0.41 | 1.60E−09 | 93.16% | 37.30% | NR4A2 | nuclear receptor subfamily 4, | Hs.82120 |
| | | | | | | | group A, member 2 | |
| 212231_at | 591 | 0.41 | 1.45E−19 | 51.15% | 21.95% | FBXO21 | F-box only protein 21 | Hs.184227 |
| 202637_s_at | 258 | 0.41 | 2.23E−11 | 72.25% | 38.03% | ICAM1 | intercellular adhesion molecule | Hs.168383 |
| | | | | | | | 1 (CD54), human rhinovirus | |
| | | | | | | | receptor | |
| 213539_at | 132 | 0.41 | 2.78E−08 | 106.66% | 39.69% | CD3D | CD3D antigen, delta | Hs.95327 |
| | | | | | | | polypeptide (TiT3 complex) | |
| 205291_at | 391 | 0.41 | 1.22E−11 | 67.18% | 38.85% | IL2RB | interleukin 2 receptor, beta | Hs.75596 |
| 202723_s_at | 261 | 0.41 | 2.90E−12 | 55.21% | 39.67% | FOXO1A | forkhead box O1A | Hs.170133 |
| | | | | | | | (rhabdomyosarcoma) | |
| 206343_s_at | 431 | 0.41 | 5.98E−10 | 55.18% | 48.19% | NRG1 | neuregulin 1 | Hs.172816 |
| 203543_s_at | 296 | 0.41 | 1.87E−10 | 92.09% | 32.00% | BTEB1 | basic transcription element | Hs.150557 |
| | | | | | | | binding protein 1 | |
| 202644_s_at | 259 | 0.41 | 5.67E−12 | 86.22% | 23.66% | TNFAIP3 | tumor necrosis factor, alpha- | Hs.211600 |
| | | | | | | | induced protein 3 | |
| 219622_at | 764 | 0.41 | 1.13E−10 | 85.10% | 35.95% | RAB20 | RAB20, member RAS | Hs.179791 |
| | | | | | | | oncogene family | |
| 219528_s_at | 762 | 0.41 | 2.09E−08 | 118.86% | 24.30% | BCL11B | B-cell CLL/lymphoma 11B | Hs.57987 |
| | | | | | | | (zinc finger protein) | |
| 217591_at | 693 | 0.41 | 2.28E−10 | 51.94% | 47.24% | | | Hs.272108 |
| 204838_s_at | 369 | 0.41 | 2.59E−10 | 38.33% | 48.54% | MLH3 | mutL homolog 3 (E. coli) | Hs.279843 |
| 213915_at | 641 | 0.41 | 4.26E−08 | 113.63% | 38.58% | NKG7 | natural killer cell group 7 | Hs.10306 |
| | | | | | | | sequence | |
| 213142_x_at | 615 | 0.40 | 3.38E−14 | 72.90% | 26.61% | LOC54103 | hypothetical protein | Hs.12969 |
| 203888_at | 312 | 0.40 | 1.09E−05 | 125.03% | 63.75% | THBD | thrombomodulin | Hs.2030 |
| 211841_s_at | 574 | 0.40 | 1.02E−12 | 83.08% | 25.18% | TNFRSF12 | tumor necrosis factor receptor | Hs.180338 |
| | | | | | | | superfamily, member 12 | |
| | | | | | | | (translocating chain- | |
| | | | | | | | association membrane protein) | |
| 204118_at | 330 | 0.40 | 9.75E−15 | 74.10% | 14.40% | CD48 | CD48 antigen (B-cell | Hs.901 |
| | | | | | | | membrane protein) | |
| 212841_s_at | 609 | 0.40 | 1.41E−07 | 48.10% | 62.68% | PPFIBP2 | PTPRF interacting protein, | Hs.12953 |
| | | | | | | | binding protein 2 (liprin beta 2) | |
| 205255_x_at | 389 | 0.40 | 4.07E−10 | 91.84% | 38.82% | TCF7 | transcription factor 7 (T-cell | Hs.169294 |
| | | | | | | | specific, HMG-box) | |
| 209871_s_at | 515 | 0.40 | 4.73E−09 | 98.50% | 42.93% | APBA2 | amyloid beta (A4) precursor | Hs.26468 |
| | | | | | | | protein-binding, family A, | |
| | | | | | | | member 2 (X11-like) | |
| 209536_s_at | 501 | 0.39 | 6.76E−15 | 55.98% | 33.99% | EHD4 | EH-domain containing 4 | Hs.4943 |
| 203708_at | 304 | 0.39 | 3.49E−11 | 95.00% | 30.17% | PDE4B | phosphodiesterase 4B, cAMP- | Hs.188 |
| | | | | | | | specific (phosphodiesterase | |
| | | | | | | | E4 dunce homolog, | |
| | | | | | | | Drosophila) | |
| 202048_s_at | 236 | 0.39 | 5.89E−16 | 63.65% | 28.85% | CBX6 | chromobox homolog 6 | Hs.107374 |
| 218205_s_at | 717 | 0.39 | 4.03E−18 | 34.91% | 30.54% | MKNK2 | MAP kinase-interacting | Hs.261828 |
| | | | | | | | serine/threonine kinase 2 | |
| 209824_s_at | 131 | 0.38 | 2.79E−13 | 73.55% | 35.30% | ARNTL | aryl hydrocarbon receptor | Hs.74515 |
| | | | | | | | nuclear translocator-like | |
| 213958_at | 102 | 0.38 | 4.17E−10 | 111.46% | 28.16% | CD6 | CD6 antigen | Hs.81226 |
| 221558_s_at | 88 | 0.38 | 8.56E−10 | 109.99% | 35.27% | LEF1 | lymphoid enhancer-binding | Hs.44865 |
| | | | | | | | factor 1 | |
| 208622_s_at | 462 | 0.38 | 4.22E−16 | 67.21% | 29.57% | VIL2 | villin 2 (ezrin) | Hs.155191 |
| 218345_at | 723 | 0.38 | 9.04E−07 | 111.02% | 62.99% | HCA112 | hepatocellular carcinoma- | Hs.12126 |
| | | | | | | | associated antigen 112 | |
| 204777_s_at | 363 | 0.38 | 5.40E−10 | 101.33% | 41.03% | MAL | mal, T-cell differentiation | Hs.80395 |
| | | | | | | | protein | |
| 213300_at | 620 | 0.37 | 9.54E−10 | 49.97% | 53.43% | KIAA0404 | KIAA0404 protein | Hs.105850 |
| 210054_at | 524 | 0.37 | 1.89E−18 | 65.35% | 23.26% | MGC4701 | hypothetical protein MGC4701 | Hs.116771 |
| 219117_s_at | 754 | 0.37 | 2.29E−10 | 97.73% | 40.82% | FKBP11 | FK506 binding protein 11 (19 kDa) | Hs.24048 |
| 204244_s_at | 339 | 0.37 | 6.56E−18 | 60.46% | 27.96% | ASK | activator of S phase kinase | Hs.152759 |
| 222142_at | 810 | 0.37 | 2.29E−22 | 50.09% | 22.95% | CYLD | cylindromatosis (turban tumor | Hs.18827 |
| | | | | | | | syndrome) | |
| 205241_at | 387 | 0.37 | 3.84E−12 | 78.99% | 39.96% | SCO2 | SCO cytochrome oxidase | Hs.278431 |
| | | | | | | | deficient homolog 2 (yeast) | |
| 202320_at | 246 | 0.37 | 5.08E−09 | 41.96% | 57.92% | GTF3C1 | general transcription factor | Hs.331 |
| | | | | | | | IIIC, polypeptide 1 (alpha | |
| | | | | | | | subunit, 220 kD) | |
| 204103_at | 328 | 0.37 | 6.82E−04 | 106.80% | 109.56% | SCYA4 | small inducible cytokine A4 | Hs.75703 |
| 211583_x_at | 565 | 0.37 | 3.06E−13 | 50.67% | 41.55% | LY117 | lymphocyte antigen 117 | Hs.88411 |
| 211962_s_at | 580 | 0.37 | 1.52E−16 | 74.42% | 25.97% | ZFP36L1 | zinc finger protein 36, C3H | Hs.85155 |
| | | | | | | | type-like 1 | |
| 204411_at | 346 | 0.37 | 1.46E−12 | 70.01% | 41.24% | KIAA0449 | KIAA0449 protein | Hs.169182 |
| 208657_s_at | 465 | 0.36 | 6.92E−19 | 66.29% | 23.55% | MSF | MLL septin-like fusion | Hs.181002 |
| 219593_at | 79 | 0.36 | 4.65E−11 | 108.68% | 31.98% | PHT2 | peptide transporter 3 | Hs.237856 |
| 222150_s_at | 811 | 0.36 | 6.54E−15 | 71.48% | 34.24% | LOC54103 | hypothetical protein | Hs.12969 |
| 201425_at | 51 | 0.36 | 1.85E−12 | 103.39% | 24.19% | ALDH2 | aldehyde dehydrogenase 2 | Hs.195432 |
| | | | | | | | family (mitochondrial) | |
| 201565_s_at | 219 | 0.36 | 1.22E−16 | 71.93% | 28.77% | ID2 | inhibitor of DNA binding 2, | Hs.180919 |
| | | | | | | | dominant negative helix-loop- | |
| | | | | | | | helix protein | |
| 209501_at | 498 | 0.36 | 1.08E−20 | 57.82% | 25.10% | CDR2 | cerebellar degeneration- | Hs.75124 |
| | | | | | | | related protein (62 kD) | |
| 221890_at | 804 | 0.36 | 6.50E−11 | 58.22% | 49.64% | ZNF335 | zinc finger protein 335 | Hs.165983 |
| 211840_s_at | 573 | 0.35 | 4.46E−15 | 59.93% | 37.12% | PDE4D | phosphodiesterase 4D, cAMP- | Hs.172081 |
| | | | | | | | specific (phosphodiesterase | |
| | | | | | | | E3 dunce homolog, | |
| | | | | | | | Drosophila) | |
| 218486_at | 726 | 0.35 | 5.27E−22 | 58.11% | 23.19% | TIEG2 | TGFB inducible early growth | Hs.12229 |
| | | | | | | | response 2 | |
| 212196_at | 590 | 0.35 | 1.52E−18 | 72.60% | 23.80% | | | Hs.71968 |
| 219359_at | 759 | 0.35 | 1.37E−12 | 82.00% | 41.21% | FLJ22635 | hypothetical protein FLJ22635 | Hs.353181 |
| 204655_at | 361 | 0.34 | 2.21E−09 | 116.09% | 47.89% | SCYA5 | small inducible cytokine A5 | Hs.241392 |
| | | | | | | | (RANTES) | |
| 206366_x_at | 432 | 0.34 | 7.78E−08 | 129.93% | 55.60% | SCYC1, | small inducible cytokine | Hs.3195 |
| | | | | | | SCYC2 | subfamily C, member 1 | |
| | | | | | | | (lymphotactin), small inducible | |
| | | | | | | | cytokine subfamily C, member 2 | |
| 214146_s_at | 646 | 0.34 | 1.46E−10 | 122.42% | 36.27% | PPBP | pro-platelet basic protein | Hs.2164 |
| | | | | | | | (includes platelet basic protein, | |
| | | | | | | | beta-thromboglobulin, | |
| | | | | | | | connective tissue-activating | |
| | | | | | | | peptide III, neutrophil- | |
| | | | | | | | activating peptide-2) | |
| 38037_at | 820 | 0.34 | 1.33E−07 | 135.13% | 56.83% | DTR | diphtheria toxin receptor | Hs.799 |
| | | | | | | | (heparin-binding epidermal | |
| | | | | | | | growth factor-like growth | |
| | | | | | | | factor) | |
| 209062_x_at | 482 | 0.34 | 9.87E−21 | 65.89% | 24.70% | NCOA3 | nuclear receptor coactivator 3 | Hs.225977 |
| 213524_s_at | 630 | 0.33 | 2.99E−10 | 105.05% | 47.78% | G0S2 | putative lymphocyte G0/G1 | Hs.432132 |
| | | | | | | | switch gene | |
| 213135_at | 614 | 0.33 | 1.80E−16 | 89.95% | 22.91% | | | Hs.82141 |
| 210479_s_at | 539 | 0.33 | 1.86E−16 | 83.74% | 29.89% | RORA | RAR-related orphan receptor A | Hs.2156 |
| 210279_at | 531 | 0.33 | 2.25E−08 | 123.27% | 56.47% | GPR18 | G protein-coupled receptor 18 | Hs.88269 |
| 1405_i_at | 155 | 0.33 | 2.64E−09 | 135.74% | 44.48% | SCYA5 | small inducible cytokine A5 | Hs.241392 |
| | | | | | | | (RANTES) | |
| 210321_at | 532 | 0.33 | 3.67E−03 | 326.10% | 90.79% | CTLA1 | similar to granzyme B | Hs.348264 |
| | | | | | | | (granzyme 2, cytotoxic T- | |
| | | | | | | | lymphocyte-associated serine | |
| | | | | | | | esterase 1) (H. sapiens) | |
| 201566_x_at | 220 | 0.33 | 2.67E−14 | 79.78% | 38.73% | ID2 | inhibitor of DNA binding 2, | Hs.180919 |
| | | | | | | | dominant negative helix-loop- | |
| | | | | | | | helix protein | |
| 204198_s_at | 336 | 0.33 | 1.17E−13 | | | RUNX3 | runt-related transcription factor 3 | Hs.170019 |
| 218696_at | 731 | 0.32 | 2.48E−23 | | | EIF2AK3 | eukaryotic translation initiation | Hs.102506 |
| | | | | | | | factor 2-alpha kinase 3 | |
| 213624_at | 152 | 0.32 | 1.74E−09 | | | | acid sphingomyelinase-like | Hs.42945 |
| | | | | | | | phosphodiesterase | |
| 218793_s_at | 736 | 0.32 | 1.17E−18 | | | SCML1 | sex comb on midleg-like 1 | Hs.109655 |
| | | | | | | | (Drosophila) | |
| 204197_s_at | 335 | 0.32 | 3.00E−17 | | | RUNX3 | runt-related transcription factor 3 | Hs.170019 |
| 209728_at | 509 | 0.32 | 2.53E−04 | 163.58% | 101.38% | HLA-DRB4 | major histocompatibility | Hs.318720 |
| | | | | | | | complex, class II, DR beta 4 | |
| 202206_at | 242 | 0.32 | 1.53E−15 | 89.61% | 32.16% | ARL7 | ADP-ribosylation factor-like 7 | Hs.111554 |
| 212195_at | 589 | 0.32 | 3.87E−17 | 90.97% | 24.26% | | | Hs.71968 |
| 206296_x_at | 428 | 0.32 | 1.58E−10 | 59.76% | 54.60% | MAP4K1 | mitogen-activated protein | Hs.95424, |
| | | | | | | | kinase kinase kinase kinase 1 | Hs.86575 |
| 201189_s_at | 193 | 0.32 | 3.76E−16 | 98.75% | 23.89% | ITPR3 | inositol 1,4,5-triphosphate | Hs.77515 |
| | | | | | | | receptor, type 3 | |
| 219099_at | 115 | 0.32 | 1.10E−20 | 66.40% | 27.62% | C12orf5 | chromosome 12 open reading | Hs.24792 |
| | | | | | | | frame 5 | |
| 210113_s_at | 527 | 0.31 | 9.95E−18 | | | NALP1 | death effector filament-forming | Hs.104305 |
| | | | | | | | Ced-4-like apoptosis protein | |
| 212187_x_at | 588 | 0.31 | 1.65E−11 | 72.81% | 50.49% | PTGDS | prostaglandin D2 synthase | Hs.8272 |
| | | | | | | | (21 kD, brain) | |
| 209604_s_at | 504 | 0.31 | 7.32E−17 | 83.69% | 32.25% | GATA3 | GATA binding protein 3 | Hs.169946 |
| 204794_at | 367 | 0.31 | 3.14E−15 | 98.27% | 32.11% | DUSP2 | dual specificity phosphatase 2 | Hs.1183 |
| 204790_at | 365 | 0.31 | 3.37E−12 | 53.77% | 49.07% | MADH7 | MAD, mothers against | Hs.100602 |
| | | | | | | | decapentaplegic homolog 7 | |
| | | | | | | | (Drosophila) | |
| 202208_s_at | 244 | 0.31 | 2.85E−11 | 97.48% | 48.91% | ARL7 | ADP-ribosylation factor-like 7 | Hs.111554 |
| 203821_at | 309 | 0.30 | 2.38E−09 | 132.98% | 52.56% | DTR | diphtheria toxin receptor | Hs.799 |
| | | | | | | | (heparin-binding epidermal | |
| | | | | | | | growth factor-like growth | |
| | | | | | | | factor) | |
| 214567_s_at | 657 | 0.30 | 7.72E−12 | 65.03% | 50.48% | SCYC1, | small inducible cytokine | Hs.174228 |
| | | | | | | SCYC2 | subfamily C, member 1 | |
| | | | | | | | (lymphotactin), small inducible | |
| | | | | | | | cytokine subfamily C, member 2 | |
| 203887_s_at | 311 | 0.30 | 1.57E−07 | 136.61% | 66.32% | THBD | thrombomodulin | Hs.2030 |
| 206655_s_at | 438 | 0.30 | 5.47E−11 | 69.52% | 53.78% | GP1BB | glycoprotein lb (platelet), beta | Hs.283743 |
| | | | | | | | polypeptide | |
| 214219_x_at | 647 | 0.30 | 2.94E−10 | 70.71% | 57.65% | MAP4K1 | mitogen-activated protein | Hs.95424, |
| | | | | | | | kinase kinase kinase kinase 1 | Hs.86575 |
| 211748_x_at | 569 | 0.29 | 6.29E−11 | | | | prostaglandin D2 synthase | Hs.8272 |
| | | | | | | | (21 kD, brain) | |
| 202988_s_at | 278 | 0.29 | 6.99E−06 | | | RGS1 | regulator of G-protein | Hs.75256 |
| | | | | | | | signalling 1 | |
| 202207_at | 243 | 0.29 | 9.60E−22 | | | ARL7 | ADP-ribosylation factor-like 7 | Hs.111554 |
| 204793_at | 366 | 0.29 | 2.70E−18 | 97.58% | 22.06% | KIAA0443 | KIAA0443 gene product | Hs.113082 |
| 214470_at | 654 | 0.29 | 1.86E−17 | 94.96% | 29.59% | KLRB1 | killer cell lectin-like receptor | Hs.169824 |
| | | | | | | | subfamily B, member 1 | |
| 210164_at | 528 | 0.29 | 1.45E−11 | 128.23% | 43.90% | GZMB | granzyme B (granzyme 2, | Hs.1051 |
| | | | | | | | cytotoxic T-lymphocyte- | |
| | | | | | | | associated serine esterase 1) | |
| 221756_at | 800 | 0.29 | 1.38E−20 | 80.93% | 27.52% | MGC17330 | hypothetical protein | Hs.26670 |
| | | | | | | | MGC17330 | |
| 206390_x_at | 433 | 0.28 | 3.02E−11 | | | PF4 | platelet factor 4 | Hs.81564 |
| 208146_s_at | 460 | 0.28 | 1.04E−17 | | | CPVL | carboxypeptidase, vitellogenic- | Hs.95594 |
| | | | | | | | like | |
| 214032_at | 642 | 0.27 | 4.56E−16 | 102.92% | 36.01% | ZAP70 | zeta-chain (TCR) associated | Hs.234569 |
| | | | | | | | protein kinase (70 kD) | |
| 216834_at | 687 | 0.27 | 9.67E−08 | 107.30% | 73.61% | RGS1 | regulator of G-protein | Hs.385701, |
| | | | | | | | signalling 1 | Hs.75256 |
| 210426_x_at | 537 | 0.26 | 4.55E−19 | 95.05% | 31.13% | RORA | RAR-related orphan receptor A | Hs.2156 |
| 220646_s_at | 783 | 0.25 | 4.98E−14 | 136.06% | 39.89% | KLRF1 | killer cell lectin-like receptor | Hs.183125 |
| | | | | | | | subfamily F, member 1 | |
| 203414_at | 294 | 0.25 | 5.84E−28 | 65.64% | 23.41% | MMD | monocyte to macrophage | Hs.79889 |
| | | | | | | | differentiation-associated | |
| 210512_s_at | 541 | 0.25 | 6.16E−11 | 77.66% | 58.76% | VEGF | vascular endothelial growth | Hs.73793 |
| | | | | | | | factor | |
| 203271_s_at | 289 | 0.24 | 1.08E−20 | 57.24% | 33.16% | UNC119 | unc-119 homolog (C. elegans) | Hs.81728 |
| 204081_at | 326 | 0.24 | 1.14E−16 | 60.84% | 40.84% | NRGN | neurogranin (protein kinase C | Hs.26944 |
| | | | | | | | substrate, RC3) | |
| 204115_at | 329 | 0.23 | 8.80E−16 | | | GNG11 | guanine nucleotide binding | Hs.83381 |
| | | | | | | | protein 11 | |
| 37145_at | 818 | 0.23 | 3.86E−12 | 161.44% | 48.15% | GNLY | granulysin | Hs.105806 |
| 205495_s_at | 398 | 0.22 | 1.07E−11 | 153.17% | 52.73% | GNLY | granulysin | Hs.105806 |
| 205237_at | 385 | 0.22 | 1.12E−17 | 131.65% | 33.86% | FCN1 | ficolin (collagen/fibrinogen | Hs.252136 |
| | | | | | | | domain containing) 1 | |
| 210031_at | 520 | 0.22 | 1.72E−21 | 106.54% | 30.59% | CD3Z | CD3Z antigen, zeta | Hs.97087 |
| | | | | | | | polypeptide (TiT3 complex) | |
| 220532_s_at | 781 | 0.21 | 3.51E−07 | 129.47% | 85.67% | LR8 | LR8 protein | Hs.190161 |
| 221211_s_at | 794 | 0.20 | 6.63E−15 | 44.22% | 46.84% | C21orf7 | chromosome 21 open reading | Hs.41267 |
| | | | | | | | frame 7 | |
| 201506_at | 213 | 0.14 | 2.13E−27 | 140.21% | 27.11% | TGFBI | transforming growth factor, | Hs.118787 |
| | | | | | | | beta-induced, 68 kD | |

[0093] Each HG-U133A qualifier represents an oligonucleotide probe set on the HG-U133A gene chip. The RNA transcript(s) of a gene that corresponds to a HG-U133A qualifier can hybridize under nucleic acid array hybridization conditions to at least one oligonucleotide probe (PM or perfect match probe) of the qualifier. Preferably, the RNA transcript(s) of the gene does not hybridize under nucleic acid array hybridization conditions to a mismatch probe (MM) of the PM probe. A mismatch probe is identical to the corresponding PM probe except for a single, homomeric substitution at or near the center of the mismatch probe. For a 25-mer PM probe, the MM probe has a homomeric base change at the 13th position.

[0094] In many cases, the RNA transcript(s) of a gene that corresponds to a HG-U133A qualifier can hybridize under nucleic acid array hybridization conditions to at least 50%, 60%, 70%, 80%, 90% or 100% of all of the PM probes of the qualifier, but not to the mismatch probes of these PM probes. In many other cases, the discrimination score (R) for each of these PM probes, as measured by the ratio of the hybridization intensity difference of the corresponding probe pair (i.e., PM−MM) over the overall hybridization intensity (i.e., PM+MM), is no less than 0.015, 0.02, 0.05, 0.1, 0.2, 0.3, 0.4, 0.5 or greater. In one example, the RNA transcript(s) of the gene, when hybridized to the HG-U133A gene chip according to the manufacturer's instructions, produces a “present” call under the default settings, i.e., the threshold Tau is 0.015 and the significance level α₁ is 0.4. See GeneChip® Expression Analysis—Data Analysis Fundamentals (Part No. 701190 Rev. 2, Affymetrix, Inc., 2002), the entire content of which is incorporated herein by reference.

[0095] The sequences of each PM probe on the HG-U133A gene chip, and the corresponding target sequences from which the PM probes are derived, can be obtained from Affymetrix's sequence databases. See, for example, www.affymetrix.com/support/technical/byproduct.affx?product=hgu133. All of these target and oligonucleotide probe sequences are incorporated herein by reference.

[0096] In addition, genes whose expression levels are significantly elevated (p<0.001) in PBMCs of AML patients relative to disease-free subjects are shown in Table 8. Genes whose expression levels are significantly lowered (p<0.001) in PBMCs of AML patients relative to disease-free subjects are shown in Table 9.

[0097] Each gene described in Tables 7, 8 and 9 and the corresponding unigene(s) are identified based on HG-U133A genechip annotations. A unigene is composed of a non-redundant set of gene-oriented clusters. Each unigene cluster is believed to include sequences that represent a unique gene. Information for each gene listed in Table 7, 8 and 9 and its corresponding unigene(s) can also be obtained from the Entrez Gene and Unigene databases at National Center for Biotechnology Information (NCBI), Bethesda, Md.

[0098] In addition to Affymetrix annotations, gene(s) that corresponds to a HG-U133A qualifier can be identified by BLAST searching the target sequence of the qualifier against a human genome sequence database. Human genome sequence databases suitable for this purpose include, but are not limited to, the NCBI human genome database. NCBI also provides BLAST programs, such as “blastn,” for searching its sequence databases. In one embodiment, the BLAST search of the NCBI human genome database is performed by using an unambiguous segment (e.g., the longest unambiguous segment) of the target sequence of the qualifier. Gene(s) that aligns to the unambiguous segment with significant sequence identity can be identified. In many cases, the identified gene(s) has at least 95%, 96%, 97%, 98%, 99%, or more sequence identity to the unambiguous segment.

[0099] As used herein, genes listed in all the Tables encompasse not only the genes that are explicitly depicted, but also genes that are not listed in the table but nonetheless corresponds to a qualifier in the table. All of these genes can be used as biological markers for the diagnosis or monitoring the development, progression or treatment of AML.

TABLE 8
Top 50 transcripts at significantly elevated levels (p < 0.001)
in PBMCs of AML patients relative to disease-free subjects

| | | | | | AML | Normal | | |
|---|---|---|---|---|---|---|---|---|
| | | | | | Average | Average | Fold Diff | p-value |
| Affymetrix ID | SEQ ID NO: | Name | Cyto Band | Unigene ID | (ppm) | (ppm) | AML/Norm | (unequal) |
| 203948_s_at | 316 | myeloperoxidase | 17q23.1 | Hs.1817 | 83.00 | 1.78 | 46.69 | 4.63E−06 |
| 203949_at | 317 | myeloperoxidase | 17q23.1 | Hs.1817 | 74.97 | 2.13 | 35.14 | 1.19E−06 |
| 206310_at | 429 | serine protease inhibitor, Kazal type, | 4q11 | Hs.98243 | 43.47 | 1.91 | 22.75 | 3.86E−06 |
| | | 2 (acrosin-trypsin inhibitor) | | | | | | |
| 209905_at | 518 | homeo box A9 | 7p15-p14 | Hs.127428 | 21.08 | 1.00 | 21.08 | 5.44E−05 |
| 214575_s_at | 658 | azurocidin 1 (cationic antimicrobial | 19p13.3 | Hs.72885 | 36.92 | 1.84 | 20.02 | 3.88E−04 |
| | | protein 37) | | | | | | |
| 206871_at | 444 | elastase 2, neutrophil | 19p13.3 | Hs.99863 | 35.58 | 1.93 | 18.41 | 1.23E−04 |
| 214651_s_at | 660 | homeo box A9 | 7p15-p14 | Hs.127428 | 29.61 | 1.82 | 16.25 | 5.98E−05 |
| 210084_x_at | 525 | tryptase beta 1, tryptase, alpha | 16p13.3 | Hs.347933 | 14.50 | 1.02 | 14.18 | 1.20E−04 |
| 205683_x_at | 411 | tryptase beta 1, tryptase beta 2, | 16p13.3 | Hs.347933 | 20.42 | 1.47 | 13.92 | 4.32E−04 |
| | | tryptase, alpha | | | | | | |
| 204798_at | 368 | v-myb myeloblastosis viral oncogene | 6q22-q23 | Hs.1334 | 35.69 | 2.76 | 12.95 | 7.41E−10 |
| | | homolog (avian) | | | | | | |
| 217023_x_at | 688 | tryptase beta 1, tryptase beta 2 | 16p13.3 | Hs.294158, | 13.08 | 1.09 | 12.02 | 1.41E−04 |
| | | | | Hs.347933 | | | | |
| 216474_x_at | 681 | tryptase beta 1, tryptase beta 2 | 16p13.3 | Hs.347933 | 18.92 | 1.71 | 11.06 | 8.25E−05 |
| 202016_at | 235 | mesoderm specific transcript | 7q32 | Hs.79284 | 34.28 | 3.11 | 11.02 | 3.63E−04 |
| | | homolog (mouse) | | | | | | |
| 207134_x_at | 447 | tryptase beta 1, tryptase beta 2, | 16p13.3 | Hs.294158 | 17.75 | 1.62 | 10.94 | 6.98E−04 |
| | | tryptase, alpha | | | | | | |
| 215382_x_at | 670 | tryptase beta 1, tryptase, alpha | 16p13.3 | Hs.347933 | 15.19 | 1.40 | 10.85 | 5.25E−05 |
| 205950_s_at | 420 | carbonic anhydrase I | 8q13-q22.1 | Hs.23118 | 101.03 | 9.31 | 10.85 | 5.23E−04 |
| 205051_s_at | 380 | v-kit Hardy-Zuckerman 4 feline | 4q11-q12 | Hs.81665 | 16.39 | 1.60 | 10.24 | 2.37E−05 |
| | | sarcoma viral oncogene homolog | | | | | | |
| 211709_s_at | 566 | stem cell growth factor; lymphocyte | 19q13.3 | Hs.105927 | 32.19 | 3.20 | 10.06 | 1.23E−06 |
| | | secreted C-type lectin | | | | | | |
| 205131_x_at | 383 | stem cell growth factor; lymphocyte | 19q13.3 | Hs.105927 | 12.31 | 1.29 | 9.55 | 1.02E−04 |
| | | secreted C-type lectin | | | | | | |
| 219054_at | 753 | hypothetical protein FLJ14054 | 5p13.2 | Hs.13528 | 14.61 | 1.76 | 8.32 | 2.05E−06 |
| 204304_s_at | 340 | prominin-like 1 (mouse) | 4p15.33 | Hs.112360 | 12.47 | 1.62 | 7.69 | 4.74E−07 |
| 206674_at | 440 | fms-related tyrosine kinase 3 | 13q12 | Hs.385 | 15.97 | 2.16 | 7.41 | 2.90E−07 |
| 207741_x_at | 456 | tryptase, alpha | 16p13.3 | Hs.334455 | 14.33 | 1.96 | 7.33 | 5.05E−05 |
| 202589_at | 257 | thymidylate synthetase | 18p11.32 | Hs.82962 | 32.89 | 4.64 | 7.08 | 1.63E−05 |
| 210783_x_at | 549 | stem cell growth factor; lymphocyte | 19q13.3 | Hs.105927 | 7.31 | 1.04 | 6.99 | 5.96E−05 |
| | | secreted C-type lectin | | | | | | |
| 211922_s_at | 576 | catalase | 11p13 | Hs.76359 | 38.47 | 5.73 | 6.71 | 1.13E−07 |
| 201427_s_at | 208 | selenoprotein P, plasma, 1 | 5q31 | Hs.3314 | 6.64 | 1.00 | 6.64 | 7.13E−04 |
| 206111_at | 424 | ribonuclease, RNase A family, 2 | 14q24-q31 | Hs.728 | 63.06 | 9.56 | 6.60 | 2.95E−05 |
| | | (liver, eosinophil-derived neurotoxin) | | | | | | |
| 202503_s_at | 255 | KIAA0101 gene product | 15q22.1 | Hs.81892 | 25.86 | 4.04 | 6.39 | 2.92E−06 |
| 220377_at | 778 | HSPC053 protein | 14q32.33 | Hs.128155 | 6.28 | 1.02 | 6.14 | 1.93E−04 |
| 201310_s_at | 200 | P311 protein | 5q21.3 | Hs.142827 | 29.44 | 4.98 | 5.92 | 2.13E−09 |
| 219672_at | 767 | erythroid associated factor | 16p11.1 | Hs.274309 | 28.78 | 4.91 | 5.86 | 9.81E−04 |
| 205624_at | 409 | carboxypeptidase A3 (mast cell) | 3q21-q25 | Hs.646 | 20.11 | 3.56 | 5.66 | 9.30E−05 |
| 205609_at | 407 | angiopoietin 1 | 8q22.3-q23 | Hs.2463 | 6.83 | 1.22 | 5.59 | 1.49E−06 |
| 206834_at | 442 | hemoglobin, delta | 11p15.5 | Hs.36977 | 183.31 | 33.40 | 5.49 | 5.46E−05 |
| 201162_at | 192 | insulin-like growth factor binding | 4q12 | Hs.119206 | 17.72 | 3.38 | 5.25 | 3.09E−07 |
| | | protein 7 | | | | | | |
| 201432_at | 209 | catalase | 11p13 | Hs.76359 | 121.17 | 23.38 | 5.18 | 1.43E−09 |
| 204430_s_at | 8 | solute carrier family 2 (facilitated | 1p36.2 | Hs.33084 | 5.86 | 1.13 | 5.17 | 6.73E−04 |
| | | glucose/fructose transporter), | | | | | | |
| | | member 5 | | | | | | |
| 220416_at | 780 | KIAA1939 protein | 15q15.2 | Hs.182738 | 9.64 | 1.87 | 5.16 | 1.24E−06 |
| 211743_s_at | 568 | proteoglycan 2, bone marrow | 11q12 | Hs.99962 | 7.58 | 1.53 | 4.95 | 7.28E−04 |
| | | (natural killer cell activator, | | | | | | |
| | | eosinophil granule major basic | | | | | | |
| | | protein) | | | | | | |
| 201416_at | 206 | Meis1, myeloid ecotropic viral | 17p11.2, | Hs.83484 | 30.64 | 6.20 | 4.94 | 1.01E−04 |
| | | integration site 1 homolog 3 | 6p22.3 | | | | | |
| | | (mouse), SRY (sex determining | | | | | | |
| | | region Y)-box 4 | | | | | | |
| 213150_at | 617 | homeo box A10 | 7p15-p14 | Hs.110637 | 8.39 | 1.71 | 4.90 | 3.44E−04 |
| 209543_s_at | 502 | CD34 antigen, FLJ00005 protein | 15, 1q32 | Hs.367690 | 11.39 | 2.33 | 4.88 | 6.90E−07 |
| 213258_at | 65 | unknown | | Hs.288582 | 5.25 | 1.09 | 4.82 | 2.40E−07 |
| 210664_s_at | 546 | tissue factor pathway inhibitor | 2q31-q32.1 | Hs.170279 | 5.89 | 1.24 | 4.73 | 8.77E−06 |
| | | (lipoprotein-associated coagulation | | | | | | |
| | | inhibitor) | | | | | | |
| 206067_s_at | 423 | Wilms tumor 1 | 11p13 | Hs.1145 | 4.72 | 1.00 | 4.72 | 2.81E−04 |
| 209757_s_at | 70 | v-myc myelocytomatosis viral related | 2p24.1 | Hs.25960 | 4.69 | 1.00 | 4.69 | 8.72E−06 |
| | | oncogene, neuroblastoma derived | | | | | | |
| | | (avian) | | | | | | |
| 213515_x_at | 629 | glycyl-tRNA synthetase, hemoglobin, | 11p15.5, 7p15 | Hs.283108 | 345.06 | 73.71 | 4.68 | 2.22E−05 |
| | | gamma A, hemoglobin, gamma G | | | | | | |
| 219837_s_at | 769 | cytokine-like protein C17 | 4p16-p15 | Hs.13872 | 5.72 | 1.24 | 4.60 | 2.68E−04 |
| 218899_s_at | 746 | brain and acute leukemia, | 8q22.3 | Hs.169395 | 6.19 | 1.36 | 4.57 | 9.36E−04 |
| | | cytoplasmic | | | | | | |

TABLE 9
Top 50 transcripts at significantly lower levels (p < 0.001)
in PBMCs of AML patients relative to disease-free subjects

| | | | | | AML | Normal | | |
|---|---|---|---|---|---|---|---|---|
| | | | | | Average | Average | Fold Diff | p-value |
| Affymetrix | SEQ ID NO: | Name | Cyto Band | Unigene ID | (ppm) | (ppm) | Norm/AML | (unequal) |
| 201506_at | 213 | transforming growth factor, beta- | 5q31 | Hs.118787 | 6.56 | 47.31 | 7.22 | 2.13E−27 |
| | | induced, 68 kD | | | | | | |
| 221211_s_at | 794 | chromosome 21 open reading | 21q22.3 | Hs.41267 | 2.44 | 11.93 | 4.88 | 6.63E−15 |
| | | frame 7 | | | | | | |
| 220532_s_at | 781 | LR8 protein | 7q35 | Hs.190161 | 3.00 | 14.02 | 4.67 | 3.51E−07 |
| 210031_at | 520 | CD3Z antigen, zeta polypeptide | 1q22-q23 | Hs.97087 | 11.72 | 53.98 | 4.60 | 1.72E−21 |
| | | (TiT3 complex) | | | | | | |
| 205237_at | 385 | ficolin (collagen/fibrinogen domain | 9q34 | Hs.252136 | 29.56 | 132.64 | 4.49 | 1.12E−17 |
| | | containing) 1 | | | | | | |
| 205495_s_at | 398 | granulysin | 2p12-q11 | Hs.105806 | 12.86 | 57.69 | 4.49 | 1.07E−11 |
| 37145_at | 818 | granulysin | 2p12-q11 | Hs.105806 | 14.22 | 62.47 | 4.39 | 3.86E−12 |
| 204115_at | 329 | guanine nucleotide binding protein | 7q31-q32 | Hs.83381 | 2.75 | 11.80 | 4.29 | 8.80E−16 |
| | | 11 | | | | | | |
| 204081_at | 326 | neurogranin (protein kinase C | 11q24 | Hs.26944 | 7.83 | 32.69 | 4.17 | 1.14E−16 |
| | | substrate, RC3) | | | | | | |
| 203271_s_at | 289 | unc-119 homolog (C. elegans) | 17q11.2 | Hs.81728 | 1.58 | 6.60 | 4.17 | 1.08E−20 |
| 210512_s_at | 541 | vascular endothelial growth factor | 6p12 | Hs.73793 | 3.00 | 12.18 | 4.06 | 6.16E−11 |
| 203414_at | 294 | monocyte to macrophage | 17q | Hs.79889 | 7.78 | 31.47 | 4.05 | 5.84E−28 |
| | | differentiation-associated | | | | | | |
| 220646_s_at | 783 | killer cell lectin-like receptor | 12p12.3-13.2 | Hs.183125 | 4.36 | 17.51 | 4.02 | 4.98E−14 |
| | | subfamily F, member 1 | | | | | | |
| 210426_x_at | 537 | RAR-related orphan receptor A | 15q21-q22 | Hs.2156 | 4.17 | 15.78 | 3.79 | 4.55E−19 |
| 216834_at | 687 | regulator of G-protein signalling 1 | 1q31 | Hs.75256 | 10.50 | 38.56 | 3.67 | 9.67E−08 |
| 214032_at | 642 | zeta-chain (TCR) associated protein | 2q12 | Hs.234569 | 4.78 | 17.49 | 3.66 | 4.56E−16 |
| | | kinase (70 kD) | | | | | | |
| 206390_x_at | 433 | platelet factor 4 | 4q12-q21 | Hs.81564 | 16.11 | 58.53 | 3.63 | 3.02E−11 |
| 208146_s_at | 460 | carboxypeptidase, vitellogenic-like | 7p15-p14 | Hs.95594 | 10.75 | 38.51 | 3.58 | 1.04E−17 |
| 221756_at | 800 | hypothetical protein MGC17330 | 22q11.2-q22 | Hs.26670 | 13.81 | 47.98 | 3.48 | 1.38E−20 |
| 210164_at | 528 | granzyme B (granzyme 2, cytotoxic | 14q11.2 | Hs.1051 | 8.28 | 28.60 | 3.46 | 1.45E−11 |
| | | T-lymphocyte-associated serine | | | | | | |
| | | esterase 1) | | | | | | |
| 211748_x_at | 569 | prostaglandin D2 synthase (21 kD, | 9q34.2-q34.3 | Hs.8272 | 5.36 | 18.47 | 3.44 | 6.29E−11 |
| | | brain) | | | | | | |
| 202988_s_at | 278 | regulator of G-protein signalling 1 | 1q31 | Hs.75256 | 2.58 | 8.89 | 3.44 | 6.99E−06 |
| 202207_at | 243 | ADP-ribosylation factor-like 7 | 2q37.2 | Hs.111554 | 20.22 | 69.47 | 3.44 | 9.60E−22 |
| 214470_at | 654 | killer cell lectin-like receptor | 12p13 | Hs.169824 | 18.14 | 61.67 | 3.40 | 1.86E−17 |
| | | subfamily B, member 1 | | | | | | |
| 204793_at | 366 | KIAA0443 gene product | Xq22.1 | Hs.113082 | 4.81 | 16.31 | 3.39 | 2.70E−18 |
| 214219_x_at | 647 | mitogen-activated protein kinase | 19q13.1-q13.4 | Hs.86575 | 2.00 | 6.78 | 3.39 | 2.94E−10 |
| | | kinase kinase kinase 1 | | | | | | |
| 206655_s_at | 438 | glycoprotein lb (platelet), beta | 22q11.21 | Hs.283743 | 2.36 | 7.82 | 3.31 | 5.47E−11 |
| | | polypeptide | | | | | | |
| 203887_s_at | 311 | thrombomodulin | 20p12-cen | Hs.2030 | 4.28 | 14.13 | 3.30 | 1.57E−07 |
| 214567_s_at | 657 | small inducible cytokine subfamily | 1q23, 1q23-q25 | Hs.174228 | 1.39 | 4.58 | 3.30 | 7.72E−12 |
| | | C, member 1 (lymphotactin), small | | | | | | |
| | | inducible cytokine subfamily C, | | | | | | |
| | | member 2 | | | | | | |
| 203821_at | 309 | diphtheria toxin receptor (heparin- | 5q23 | Hs.799 | 11.81 | 38.84 | 3.29 | 2.38E−09 |
| | | binding epidermal growth factor-like | | | | | | |
| | | growth factor) | | | | | | |
| 202208_s_at | 244 | ADP-ribosylation factor-like 7 | 2q37.2 | Hs.111554 | 8.67 | 28.07 | 3.24 | 2.85E−11 |
| 204790_at | 365 | MAD, mothers against | 18q21.1 | Hs.100602 | 2.81 | 9.07 | 3.23 | 3.37E−12 |
| | | decapentaplegic homolog 7 | | | | | | |
| | | (Drosophila) | | | | | | |
| 210113_s_at | 527 | death effector filament-forming Ced- | 17p13 | Hs.104305 | 3.61 | 11.64 | 3.22 | 9.95E−18 |
| | | 4-like apoptosis protein | | | | | | |
| 204794_at | 367 | dual specificity phosphatase 2 | 2q11 | Hs.1183 | 7.64 | 24.51 | 3.21 | 3.14E−15 |
| 209604_s_at | 504 | GATA binding protein 3 | 10p15 | Hs.169946 | 7.36 | 23.60 | 3.21 | 7.32E−17 |
| 212187_x_at | 588 | prostaglandin D2 synthase (21 kD, | 9q34.2-q34.3 | Hs.8272 | 4.03 | 12.91 | 3.21 | 1.65E−11 |
| | | brain) | | | | | | |
| 219099_at | 115 | chromosome 12 open reading | 12p13.3 | Hs.24792 | 3.78 | 11.96 | 3.16 | 1.10E−20 |
| | | frame 5 | | | | | | |
| 201189_s_at | 193 | inositol 1,4,5-triphosphate receptor, | 6p21 | Hs.77515 | 2.94 | 9.31 | 3.16 | 3.76E−16 |
| | | type 3 | | | | | | |
| 206296_x_at | 428 | mitogen-activated protein kinase | 19q13.1-q13.4 | Hs.86575 | 2.86 | 8.96 | 3.13 | 1.58E−10 |
| | | kinase kinase kinase 1 | | | | | | |
| 212195_at | 589 | Unknown | N/a | Hs.71968 | 8.11 | 25.33 | 3.12 | 3.87E−17 |
| 218696_at | 731 | eukaryotic translation initiation | 2p12 | Hs.102506 | 6.86 | 21.42 | 3.12 | 2.48E−23 |
| | | factor 2-alpha kinase 3 | | | | | | |
| 213624_at | 152 | acid sphingomyelinase-like | 6 | Hs.42945 | 2.19 | 6.82 | 3.11 | 1.74E−09 |
| | | phosphodiesterase | | | | | | |
| 202206_at | 242 | ADP-ribosylation factor-like 7 | 2q37.2 | Hs.111554 | 14.14 | 43.80 | 3.10 | 1.53E−15 |
| 209728_at | 509 | major histocompatibility complex, | 6p21.3 | Hs.318720 | 11.25 | 34.69 | 3.08 | 2.53E−04 |
| | | class II, DR beta 4 | | | | | | |
| 218793_s_at | 736 | sex comb on midleg-like 1 | Xp22.2-p22.1 | Hs.109655 | 2.03 | 6.24 | 3.08 | 1.17E−18 |
| | | (Drosophila) | | | | | | |
| 204197_s_at | 335 | runt-related transcription factor 3 | 1p36 | Hs.170019 | 19.69 | 60.64 | 3.08 | 3.00E−17 |
| 201566_x_at | 220 | inhibitor of DNA binding 2, | 2p25 | Hs.180919 | 5.64 | 17.31 | 3.07 | 2.67E−14 |
| | | dominant negative helix-loop-helix | | | | | | |
| | | protein | | | | | | |
| 204198_s_at | 336 | runt-related transcription factor 3 | 1p36 | Hs.170019 | 12.08 | 37.00 | 3.06 | 1.17E−13 |
| 1405_i_at | 155 | small inducible cytokine A5 | 17q11.2-q12 | Hs.241392 | 11.69 | 35.67 | 3.05 | 2.64E−09 |
| | | (RANTES) | | | | | | |
| 210279_at | 531 | G protein-coupled receptor 18 | 13q32 | Hs.88269 | 4.28 | 13.02 | 3.04 | 2.25E−08 |

### Prognosis, Diagnosis and Selection of Treatment of AML or Other Leukemias

[0100] The prognostic genes of the present invention can be used for the prediction of clinical outcome of a leukemia patient of interest. The prediction typically involves comparison of the peripheral blood expression profile of one or more prognostic genes in the leukemia patient of interest to at least one reference expression profile. Each prognostic gene employed in the present invention is differentially expressed in peripheral blood samples of leukemia patients who have different clinical outcomes.

[0101] In one embodiment, the prognostic genes employed for the outcome prediction are selected such that the peripheral blood expression profile of each prognostic gene is correlated with a class distinction under a class-based correlation analysis (such as the nearest-neighbor analysis), where the class distinction represents an idealized expression pattern of the selected genes in peripheral blood samples of leukemia patients who have different clinical outcomes. In many cases, the selected prognostic genes are correlated with the class distinction at above the 50%, 25%, 10%, 5%, or 1% significance level under a random permutation test.

[0102] The prognostic genes can also be selected such that the average expression profile of each prognostic gene in peripheral blood samples of one class of leukemia patients is statistically different from that in another class of leukemia patients. For instance, the p-value under a Student's t-test for the observed difference can be no more than 0.05, 0.01, 0.005, 0.001, or less. In addition, the prognostic genes can be selected such that the average peripheral blood expression level of each prognostic gene in one class of patients is at least 2-, 3-, 4-, 5-, 10-, or 20-fold different from that in another class of patients.

[0103] The expression profile of a patient of interest can be compared to one or more reference expression profiles. The reference expression profiles can be determined concurrently with the expression profile of the patient of interest. The reference expression profiles can also be predetermined or prerecorded in electronic or other types of storage media.

[0104] The reference expression profiles can include average expression profiles, or individual profiles representing peripheral blood gene expression patterns in particular patients. In one embodiment, the reference expression profiles include an average expression profile of the prognostic gene(s) in peripheral blood samples of reference leukemia patients who have known or determinable clinical outcome. Any averaging method may be used, such as arithmetic means, harmonic means, average of absolute values, average of log-transformed values, or weighted average. In one example, the reference leukemia patients have the same clinical outcome. In another example, the reference leukemia patients can be divided into at least two classes, each class of patients having a different respective clinical outcome. The average peripheral blood expression profile in each class of patients constitutes a separate reference expression profile, and the expression profile of the patient of interest is compared to each of these reference expression profiles.

[0105] In another embodiment, the reference expression profiles includes a plurality of expression profiles, each of which represents the peripheral blood expression pattern of the prognostic gene(s) in a particular leukemia patient whose clinical outcome is known or determinable. Other types of reference expression profiles can also be used in the present invention. In yet another embodiment, the present invention uses a numerical threshold as a control level.

[0106] The expression profile of the patient of interest and the reference expression profile(s) can be constructed in any form. In one embodiment, the expression profiles comprise the expression level of each prognostic gene used in outcome prediction. The expression levels can be absolute, normalized, or relative levels. Suitable normalization procedures include, but are not limited to, those used in nucleic acid array gene expression analyses or those described in Hill, et al., GENOME BIOL, 2:research0055.1-0055.13 (2001). In one example, the expression levels are normalized such that the mean is zero and the standard deviation is one. In another example, the expression levels are normalized based on internal or external controls, as appreciated by those skilled in the art. In still another example, the expression levels are normalized against one or more control transcripts with known abundances in blood samples. In many cases, the expression profile of the patient of interest and the reference expression profile(s) are constructed using the same or comparable methodologies.

[0107] In another embodiment, each expression profile being compared comprises one or more ratios between the expression levels of different prognostic genes. An expression profile can also include other measures that are capable of representing gene expression patterns.

[0108] The peripheral blood samples used in the present invention can be either whole blood samples, or samples comprising enriched PBMCs. In one example, the peripheral blood samples used for preparing the reference expression profile(s) comprise enriched or purified PBMCs, and the peripheral blood sample used for preparing the expression profile of the patient of interest is a whole blood sample. In another example, all of the peripheral blood samples employed in outcome prediction comprise enriched or purified PBMCs. In many cases, the peripheral blood samples are prepared from the patient of interest and reference patients using the same or comparable procedures.

[0109] Other types of blood samples can also be employed in the present invention, and the gene expression profiles in these blood samples are statistically significantly correlated with patient outcome.

[0110] The peripheral blood samples used in the present invention can be isolated from respective patients at any disease or treatment stage, and the correlation between the gene expression patterns in these peripheral blood samples and clinical outcome is statistically significant. In many embodiments, clinical outcome is measured by patients' response to a therapeutic treatment, and all of the blood samples used in outcome prediction are isolated prior to the therapeutic treatment. The expression profiles derived from these blood samples are therefore baseline expression profiles for the therapeutic treatment.

[0111] Construction of the expression profiles typically involves detection of the expression level of each prognostic gene used in the outcome prediction. Numerous methods are available for this purpose. For instance, the expression level of a gene can be determined by measuring the level of the RNA transcript(s) of the gene. Suitable methods include, but are not limited to, quantitative RT-PCT, Northern Blot, in situ hybridization, slot-blotting, nuclease protection assay, and nucleic acid array (including bead array). The expression level of a gene can also be determined by measuring the level of the polypeptide(s) encoded by the gene. Suitable methods include, but are not limited to, immunoassays (such as ELISA, RIA, FACS, or Western blot), 2-dimensional gel electrophoresis, mass spectrometry, or protein arrays.

[0112] In one aspect, the expression level of a prognostic gene is determined by measuring the RNA transcript level of the gene in a peripheral blood sample. RNA can be isolated from the peripheral blood sample using a variety of methods. Exemplary methods include guanidine isothiocyanate/acidic phenol method, the TRIZOL® Reagent (Invitrogen), or the Micro-FastTrack™ 2.0 or FastTrack™ 2.0 mRNA Isolation Kits (Invitrogen). The isolated RNA can be either total RNA or mRNA. The isolated RNA can be amplified to cDNA or cRNA before subsequent detection or quantitation. The amplification can be either specific or non-specific. Suitable amplification methods include, but are not limited to, reverse transcriptase PCR(RT-PCR), isothermal amplification, ligase chain reaction, and Qbeta replicase.

[0113] In one embodiment, the amplification protocol employs reverse transcriptase. The isolated mRNA can be reverse transcribed into cDNA using a reverse transcriptase, and a primer consisting of oligo (dT) and a sequence encoding the phage T7 promoter. The cDNA thus produced is single-stranded. The second strand of the cDNA is synthesized using a DNA polymerase, combined with an RNase to break up the DNA/RNA hybrid. After synthesis of the double-stranded cDNA, T7 RNA polymerase is added, and cRNA is then transcribed from the second strand of the doubled-stranded cDNA. The amplified cDNA or cRNA can be detected or quantitated by hybridization to labeled probes. The cDNA or cRNA can also be labeled during the amplification process and then detected or quantitated.

[0114] In another embodiment, quantitative RT-PCR (such as TaqMan, ABI) is used for detecting or comparing the RNA transcript level of a prognostic gene of interest. Quantitative RT-PCR involves reverse transcription (RT) of RNA to cDNA followed by relative quantitative PCR(RT-PCR).

[0115] In PCR, the number of molecules of the amplified target DNA increases by a factor approaching two with every cycle of the reaction until some reagent becomes limiting. Thereafter, the rate of amplification becomes increasingly diminished until there is not an increase in the amplified target between cycles. If a graph is plotted on which the cycle number is on the X axis and the log of the concentration of the amplified target DNA is on the Y axis, a curved line of characteristic shape can be formed by connecting the plotted points. Beginning with the first cycle, the slope of the line is positive and constant. This is said to be the linear portion of the curve. After some reagent becomes limiting, the slope of the line begins to decrease and eventually becomes zero. At this point the concentration of the amplified target DNA becomes asymptotic to some fixed value. This is said to be the plateau portion of the curve.

[0116] The concentration of the target DNA in the linear portion of the PCR is proportional to the starting concentration of the target before the PCR is begun. By determining the concentration of the PCR products of the target DNA in PCR reactions that have completed the same number of cycles and are in their linear ranges, it is possible to determine the relative concentrations of the specific target sequence in the original DNA mixture. If the DNA mixtures are cDNAs synthesized from RNAs isolated from different tissues or cells, the relative abundances of the specific mRNA from which the target sequence was derived may be determined for the respective tissues or cells. This direct proportionality between the concentration of the PCR products and the relative mRNA abundances is true in the linear range portion of the PCR reaction.

[0117] The final concentration of the target DNA in the plateau portion of the curve is determined by the availability of reagents in the reaction mix and is independent of the original concentration of target DNA. Therefore, in one embodiment, the sampling and quantifying of the amplified PCR products are carried out when the PCR reactions are in the linear portion of their curves. In addition, relative concentrations of the amplifiable cDNAs can be normalized to some independent standard, which may be based on either internally existing RNA species or externally introduced RNA species. The abundance of a particular mRNA species may also be determined relative to the average abundance of all mRNA species in the sample.

[0118] In one embodiment, the PCR amplification utilizes internal PCR standards that are approximately as abundant as the target. This strategy is effective if the products of the PCR amplifications are sampled during their linear phases. If the products are sampled when the reactions are approaching the plateau phase, then the less abundant product may become relatively over-represented. Comparisons of relative abundances made for many different RNA samples, such as is the case when examining RNA samples for differential expression, may become distorted in such a way as to make differences in relative abundances of RNAs appear less than they actually are. This can be improved if the internal standard is much more abundant than the target. If the internal standard is more abundant than the target, then direct linear comparisons may be made between RNA samples.

[0119] A problem inherent in clinical samples is that they are of variable quantity or quality. This problem can be overcome if the RT-PCR is performed as a relative quantitative RT-PCR with an internal standard in which the internal standard is an amplifiable cDNA fragment that is larger than the target cDNA fragment and in which the abundance of the mRNA encoding the internal standard is roughly 5-100 fold higher than the mRNA encoding the target. This assay measures relative abundance, not absolute abundance of the respective mRNA species.

[0120] In another embodiment, the relative quantitative RT-PCR uses an external standard protocol. Under this protocol, the PCR products are sampled in the linear portion of their amplification curves. The number of PCR cycles that are optimal for sampling can be empirically determined for each target cDNA fragment. In addition, the reverse transcriptase products of each RNA population isolated from the various samples can be normalized for equal concentrations of amplifiable cDNAs. While empirical determination of the linear range of the amplification curve and normalization of cDNA preparations are tedious and time-consuming processes, the resulting RT-PCR assays may, in certain cases, be superior to those derived from a relative quantitative RT-PCR with an internal standard.

[0121] In yet another embodiment, nucleic acid arrays (including bead arrays) are used for detecting or comparing the expression profiles of a prognostic gene of interest. The nucleic acid arrays can be commercial oligonucleotide or cDNA arrays. They can also be custom arrays comprising concentrated probes for the prognostic genes of the present invention. In many examples, at least 15%, 20%, 25%, 30%, 35%, 40%, 45%, 50%, or more of the total probes on a custom array of the present invention are probes for leukemia prognostic genes. These probes can hybridize under stringent or nucleic acid array hybridization conditions to the RNA transcripts, or the complements thereof, of the corresponding prognostic genes.

[0122] As used herein, “stringent conditions” are at least as stringent as, for example, conditions G-L shown in Table 10. “Highly stringent conditions” are at least as stringent as conditions A-F shown in Table 10. Hybridization is carried out under the hybridization conditions (Hybridization Temperature and Buffer) for about four hours, followed by two 20-minute washes under the corresponding wash conditions (Wash Temp. and Buffer).

TABLE 10
Stringency Conditions

| | Poly- | Hybrid | Hybridization | |
|---|---|---|---|---|
| Stringency | nucleotide | Length | Temperature and | Wash Temp. |
| Condition | Hybrid | (bp)¹ | Buffer^{H} | and Buffer^{H} |
| A | DNA:DNA | >50 | 65° C.; 1xSSC -or- | 65° C.; |
| | | | 42° C.; 1xSSC, 50% | 0.3xSSC |
| | | | formamide | |
| B | DNA:DNA | <50 | T_{B}*; 1xSSC | T_{B}*; 1xSSC |
| C | DNA:RNA | >50 | 67° C.; 1xSSC -or- | 67° C.; |
| | | | 45° C.; 1xSSC, 50% | 0.3xSSC |
| | | | formamide | |
| D | DNA:RNA | <50 | T_{D}*; 1xSSC | T_{D}*; 1xSSC |
| E | RNA:RNA | >50 | 70° C.; 1xSSC -or- | 70° C.; |
| | | | 50° C.; 1xSSC, 50% | 0.3xSSC |
| | | | formamide | |
| F | RNA:RNA | <50 | T_{F}*; 1xSSC | T_{f}*; 1xSSC |
| G | DNA:DNA | >50 | 65° C.; 4xSSC -or- | 65° C.; 1xSSC |
| | | | 42° C.; 4xSSC, 50% | |
| | | | formamide | |
| H | DNA:DNA | <50 | T_{H}*; 4xSSC | T_{H}*; 4xSSC |
| I | DNA:RNA | >50 | 67° C.; 4xSSC -or- | 67° C.; 1xSSC |
| | | | 45° C.; 4xSSC, 50% | |
| | | | formamide | |
| J | DNA:RNA | <50 | T_{J}*; 4xSSC | T_{J}*; 4xSSC |
| K | RNA:RNA | >50 | 70° C.; 4xSSC -or- | 67° C.; 1xSSC |
| | | | 50° C.; 4xSSC, 50% | |
| | | | formamide | |
| L | RNA:RNA | <50 | T_{L}*; 2xSSC | T_{L}*; 2xSSC |

¹The hybrid length is that anticipated for the hybridized region(s) of the hybridizing polynucleotides. When hybridizing a polynucleotide to a target polynucleotide of unknown sequence, the hybrid length is assumed to be that of the hybridizing polynucleotide. When polynucleotides of known sequence are hybridized, the hybrid length can be determined by aligning the sequences of the polynucleotides and identifying the region or regions of optimal sequence complementarity.
^{H}SSPE (1x SSPE is 0.15M NaCl, 10 mM NaH₂PO₄, and 1.25 mM EDTA, pH 7.4) can be substituted for SSC (1x SSC is 0.15M NaCl and 15 mM sodium citrate) in the hybridization and wash buffers.
T_{B}*-T_{R}*: The hybridization temperature for hybrids anticipated to be less than 50 base pairs in length should be 5-10° C. less than the melting temperature (Tₘ) of the hybrid, where Tₘ is determined according to the following equations. For hybrids less than 18 base pairs in length, Tₘ(° C.) = 2(# of A + T bases) + 4(# of G + C bases). For hybrids between 18 and 49 base pairs in length, Tₘ (° C.) = 81.5 + 16.6(log₁₀[Na⁺]) + 0.41(% G + C) − (600/N), where N is the number of bases in the hybrid, and [Na⁺] is the molar concentration of sodium ions in the hybridization buffer ([Na⁺] for 1x SSC = 0.165 M).

[0123] In one example, a nucleic acid array of the present invention includes at least 2, 5, 10, or more different probes. Each of these probes is capable of hybridizing under stringent or nucleic acid array hybridization conditions to a different respective prognostic gene of the present invention. Multiple probes for the same prognostic gene can be used on the same nucleic acid array. The probe density on the array can be in any range.

[0124] The probes for a prognostic gene of the present invention can be a nucleic acid probe, such as, DNA, RNA, PNA, or a modified form thereof. The nucleotide residues in each probe can be either naturally occurring residues (such as deoxyadenylate, deoxycytidylate, deoxyguanylate, deoxythymidylate, adenylate, cytidylate, guanylate, and uridylate), or synthetically produced analogs that are capable of forming desired base-pair relationships. Examples of these analogs include, but are not limited to, aza and deaza pyrimidine analogs, aza and deaza purine analogs, and other heterocyclic base analogs, wherein one or more of the carbon and nitrogen atoms of the purine and pyrimidine rings are substituted by heteroatoms, such as oxygen, sulfur, selenium, and phosphorus. Similarly, the polynucleotide backbones of the probes can be either naturally occurring (such as through 5′ to 3′ linkage), or modified. For instance, the nucleotide units can be connected via non-typical linkage, such as 5′ to 2′ linkage, so long as the linkage does not interfere with hybridization. For another instance, peptide nucleic acids, in which the constitute bases are joined by peptide bonds rather than phosphodiester linkages, can be used.

[0125] The probes for the prognostic genes can be stably attached to discrete regions on a nucleic acid array. By “stably attached,” it means that a probe maintains its position relative to the attached discrete region during hybridization and signal detection. The position of each discrete region on the nucleic acid array can be either known or determinable. All of the methods known in the art can be used to make the nucleic acid arrays of the present invention.

[0126] In another embodiment, nuclease protection assays are used to quantitate RNA transcript levels in peripheral blood samples. There are many different versions of nuclease protection assays. The common characteristic of these nuclease protection assays is that they involve hybridization of an antisense nucleic acid with the RNA to be quantified. The resulting hybrid double-stranded molecule is then digested with a nuclease that digests single-stranded nucleic acids more efficiently than double-stranded molecules. The amount of antisense nucleic acid that survives digestion is a measure of the amount of the target RNA species to be quantified. Examples of suitable nuclease protection assays include the RNase protection assay provided by Ambion, Inc. (Austin, Tex.).

[0127] Hybridization probes or amplification primers for the prognostic genes of the present invention can be prepared by using any method known in the art. For prognostic genes whose genomic locations have not been determined or whose identities are solely based on EST or mRNA data, the probes/primers for these genes can be derived from the target sequences of the corresponding qualifiers, or the corresponding EST or mRNA sequences.

[0128] In one embodiment, the probes/primers for a prognostic gene significantly diverge from the sequences of other prognostic genes. This can be achieved by checking potential probe/primer sequences against a human genome sequence database, such as the Entrez database at the NCBI. One algorithm suitable for this purpose is the BLAST algorithm. This algorithm involves first identifying high scoring sequence pairs (HSPs) by identifying short words of length W in the query sequence, which either match or satisfy some positive-valued threshold score T when aligned with a word of the same length in a database sequence. T is referred to as the neighborhood word score threshold. The initial neighborhood word hits act as seeds for initiating searches to find longer HSPs containing them. The word hits are then extended in both directions along each sequence to increase the cumulative alignment score. Cumulative scores are calculated using, for nucleotide sequences, the parameters M (reward score for a pair of matching residues; always >0) and N (penalty score for mismatching residues; always <0). The BLAST algorithm parameters W, T, and X determine the sensitivity and speed of the alignment. These parameters can be adjusted for different purposes, as appreciated by those skilled in the art.

[0129] In another embodiment, the probes for prognostic genes can be polypeptide in nature, such as, antibody probes. The expression levels of the prognostic genes of the present invention are thus determined by measuring the levels of polypeptides encoded by the prognostic genes. Methods suitable for this purpose include, but are not limited to, immunoassays such as ELISA, RIA, FACS, dot blot, Western Blot, immunohistochemistry, and antibody-based radioimaging. In addition, high-throughput protein sequencing, 2-dimensional SDS-polyacrylamide gel electrophoresis, mass spectrometry, or protein arrays can be used.

[0130] In one embodiment, ELISAs are used for detecting the levels of the target proteins. In an exemplifying ELISA, antibodies capable of binding to the target proteins are immobilized onto selected surfaces exhibiting protein affinity, such as wells in a polystyrene or polyvinylchloride microtiter plate. Samples to be tested are then added to the wells. After binding and washing to remove non-specifically bound immunocomplexes, the bound antigen(s) can be detected. Detection can be achieved by the addition of a second antibody which is specific for the target proteins and is linked to a detectable label. Detection can also be achieved by the addition of a second antibody, followed by the addition of a third antibody that has binding affinity for the second antibody, with the third antibody being linked to a detectable label. Before being added to the microtiter plate, cells in the samples can be lysed or extracted to separate the target proteins from potentially interfering substances.

[0131] In another exemplifying ELISA, the samples suspected of containing the target proteins are immobilized onto the well surface and then contacted with the antibodies. After binding and washing to remove non-specifically bound immunocomplexes, the bound antigen detected. Where the initial antibodies are linked to a detectable label, the immunocomplexes can be detected directly. The immunocomplexes can also be detected using a second antibody that has binding affinity for the first antibody, with the second antibody being linked to a detectable label.

[0132] Another exemplary ELISA involves the use of antibody competition in the detection. In this ELISA, the target proteins are immobilized on the well surface. The labeled antibodies are added to the well, allowed to bind to the target proteins, and detected by means of their labels. The amount of the target proteins in an unknown sample is then determined by mixing the sample with the labeled antibodies before or during incubation with coated wells. The presence of the target proteins in the unknown sample acts to reduce the amount of antibody available for binding to the well and thus reduces the ultimate signal.

[0133] Different ELISA formats can have certain features in common, such as coating, incubating or binding, washing to remove non-specifically bound species, and detecting the bound immunocomplexes. For instance, in coating a plate with either antigen or antibody, the wells of the plate can be incubated with a solution of the antigen or antibody, either overnight or for a specified period of hours. The wells of the plate are then washed to remove incompletely adsorbed material. Any remaining available surfaces of the wells are then “coated” with a nonspecific protein that is antigenically neutral with regard to the test samples. Examples of these nonspecific proteins include bovine serum albumin (BSA), casein and solutions of milk powder. The coating allows for blocking of nonspecific adsorption sites on the immobilizing surface and thus reduces the background caused by nonspecific binding of antisera onto the surface.

[0134] In ELISAs, a secondary or tertiary detection means can be used. After binding of a protein or antibody to the well, coating with a non-reactive material to reduce background, and washing to remove unbound material, the immobilizing surface is contacted with the control or clinical or biological sample to be tested under conditions effective to allow immunocomplex (antigen/antibody) formation. These conditions may include, for example, diluting the antigens and antibodies with solutions such as BSA, bovine gamma globulin (BGG) and phosphate buffered saline (PBS)/Tween and incubating the antibodies and antigens at room temperature for about 1 to 4 hours or at 4° C. overnight. Detection of the immunocomplex is facilitated by using a labeled secondary binding ligand or antibody, or a secondary binding ligand or antibody in conjunction with a labeled tertiary antibody or third binding ligand.

[0135] Following all incubation steps in an ELISA, the contacted surface can be washed so as to remove non-complexed material. For instance, the surface may be washed with a solution such as PBS/Tween, or borate buffer. Following the formation of specific immunocomplexes between the test sample and the originally bound material, and subsequent washing, the occurrence of the amount of immunocomplexes can be determined.

[0136] To provide a detecting means, the second or third antibody can have an associated label to allow detection. In one embodiment, the label is an enzyme that generates color development upon incubating with an appropriate chromogenic substrate. Thus, for example, one may contact and incubate the first or second immunocomplex with a urease, glucose oxidase, alkaline phosphatase or hydrogen peroxidase-conjugated antibody for a period of time and under conditions that favor the development of further immunocomplex formation (e.g., incubation for 2 hours at room temperature in a PBS-containing solution such as PBS-Tween).

[0137] After incubation with the labeled antibody, and subsequent washing to remove unbound material, the amount of label can be quantified, e.g., by incubation with a chromogenic substrate such as urea and bromocresol purple or 2,2′-azido-di-(3-ethyl)-benzthiazoline-6-sulfonic acid (ABTS) and H₂O₂, in the case of peroxidase as the enzyme label. Quantitation can be achieved by measuring the degree of color generation, e.g., using a spectrophotometer.

[0138] Another method suitable for detecting polypeptide levels is RIA (radioimmunoassay). An exemplary RIA is based on the competition between radiolabeled-polypeptides and unlabeled polypeptides for binding to a limited quantity of antibodies. Suitable radiolabels include, but are not limited to, I¹²⁵. In one embodiment, a fixed concentration of I¹²⁵-labeled polypeptide is incubated with a series of dilution of an antibody specific to the polypeptide. When the unlabeled polypeptide is added to the system, the amount of the I¹²⁵-polypeptide that binds to the antibody is decreased. A standard curve can therefore be constructed to represent the amount of antibody-bound I¹²⁵-polypeptide as a function of the concentration of the unlabeled polypeptide. From this standard curve, the concentration of the polypeptide in unknown samples can be determined. Protocols for conducting RIA are well known in the art.

[0139] Suitable antibodies for the present invention include, but are not limited to, polyclonal antibodies, monoclonal antibodies, chimeric antibodies, humanized antibodies, single chain antibodies, Fab fragments, or fragments produced by a Fab expression library. Neutralizing antibodies (i.e., those which inhibit dimer formation) can also be used. Methods for preparing these antibodies are well known in the art. In one embodiment, the antibodies of the present invention can bind to the corresponding prognostic gene products or other desired antigens with binding affinities of at least 10⁴ M⁻¹, 10⁵ M⁻¹, 10⁶ M⁻¹, 10⁷ M⁻¹, or more.

[0140] The antibodies of the present invention can be labeled with one or more detectable moieties to allow for detection of antibody-antigen complexes. The detectable moieties can include compositions detectable by spectroscopic, enzymatic, photochemical, biochemical, bioelectronic, immunochemical, electrical, optical or chemical means. The detectable moieties include, but are not limited to, radioisotopes, chemiluminescent compounds, labeled binding proteins, heavy metal atoms, spectroscopic markers such as fluorescent markers and dyes, magnetic labels, linked enzymes, mass spectrometry tags, spin labels, electron transfer donors and acceptors, and the like.

[0141] The antibodies of the present invention can be used as probes to construct protein arrays for the detection of expression profiles of the prognostic genes. Methods for making protein arrays or biochips are well known in the art. In many embodiments, a substantial portion of probes on a protein array of the present invention are antibodies specific for the prognostic gene products. For instance, at least 10%, 20%, 30%, 40%, 50%, or more probes on the protein array can be antibodies specific for the prognostic gene products.

[0142] In yet another aspect, the expression levels of the prognostic genes are determined by measuring the biological functions or activities of these genes. Where a biological function or activity of a gene is known, suitable in vitro or in vivo assays can be developed to evaluate the function or activity. These assays can be subsequently used to assess the level of expression of the prognostic gene.

[0143] After the expression level of each prognostic gene is determined, numerous approaches can be employed to compare expression profiles. Comparison of the expression profile of a patient of interest to the reference expression profile(s) can be conducted manually or electronically. In one example, comparison is carried out by comparing each component in one expression profile to the corresponding component in a reference expression profile. The component can be the expression level of a prognostic gene, a ratio between the expression levels of two prognostic genes, or another measure capable of representing gene expression patterns. The expression level of a gene can have an absolute or a normalized or relative value. The difference between two corresponding components can be assessed by fold changes, absolute differences, or other suitable means.

[0144] Comparison of the expression profile of a patient of interest to the reference expression profile(s) can also be conducted using pattern recognition or comparison programs, such as the k-nearest-neighbors algorithm as described in Armstrong, et al., NATURE GENETICS, 30:41-47 (2002), or the weighted voting algorithm as described below. In addition, the serial analysis of gene expression (SAGE) technology, the GEMTOOLS gene expression analysis program (Incyte Pharmaceuticals), the GeneCalling and Quantitative Expression Analysis technology (Curagen), and other suitable methods, programs or systems can be used to compare expression profiles.

[0145] Multiple prognostic genes can be used in the comparison of expression profiles. For instance, 2, 4, 6, 8, 10, 12, 14, or more prognostic genes can be used. In addition, the prognostic gene(s) used in the comparison can be selected to have relatively small p-values (e.g., two-sided p-values). In many examples, the p-values indicate the statistical significance of the difference between gene expression levels in different classes of patients. In many other examples, the p-values suggest the statistical significance of the correlation between gene expression patterns and clinical outcome. In one embodiment, the prognostic genes used in the comparison have p-values of no greater than 0.05, 0.01, 0.001, 0.0005, 0.0001, or less. Prognostic genes with p-values of greater than 0.05 can also be used. These genes may be identified, for instance, by using a relatively small number of blood samples.

[0146] Similarity or difference between the expression profile of a patient of interest and a reference expression profile is indicative of the class membership of the patient of interest. Similarity or difference can be determined by any suitable means. The comparison can be qualitative, quantitative, or both.

[0147] In one example, a component in a reference profile is a mean value, and the corresponding component in the expression profile of the patient of interest falls within the standard deviation of the mean value. In such a case, the expression profile of the patient of interest may be considered similar to the reference profile with respect to that particular component. Other criteria, such as a multiple or fraction of the standard deviation or a certain degree of percentage increase or decrease, can be used to measure similarity.

[0148] In another example, at least 50% (e.g., at least 60%, 70%, 80%, 90%, or more) of the components in the expression profile of the patient of interest are considered similar to the corresponding components in a reference profile. Under these circumstances, the expression profile of the patient of interest may be considered similar to the reference profile. Different components in the expression profile may have different weights for the comparison. In some cases, lower percentage thresholds (e.g., less than 50% of the total components) are used to determine similarity.

[0149] The prognostic gene(s) and the similarity criteria can be selected such that the accuracy of outcome prediction (the ratio of correct calls over the total of correct and incorrect calls) is relatively high. For instance, the accuracy of prediction can be at least 50%, 60%, 70%, 80%, 90%, or more.

[0150] The effectiveness of outcome prediction can also be assessed by sensitivity and specificity. The prognostic genes and the comparison criteria can be selected such that both the sensitivity and specificity of outcome prediction are relatively high. For instance, the sensitivity and specificity can be at least 50%, 60%, 70%, 80%, 90%, 95%, or more. As used herein, “sensitivity” refers to the ratio of correct positive calls over the total of true positive calls plus false negative calls, and “specificity” refers to the ratio of correct negative calls over the total of true negative calls plus false positive calls.

[0151] Moreover, peripheral blood expression profile-based outcome prediction can be combined with other clinical evidence or prognostic methods to improve the effectiveness or accuracy of outcome prediction.

[0152] In many embodiments, the expression profile of a patient of interest is compared to at least two reference expression profiles. Each reference expression profile can include an average expression profile, or a set of individual expression profiles each of which represents the peripheral blood gene expression pattern in a particular AML patient or disease-free human. Suitable methods for comparing one expression profile to two or more reference expression profiles include, but are not limited to, the weighted voting algorithm or the k-nearest-neighbors algorithm. Softwares capable of performing these algorithms include, but are not limited to, GeneCluster 2 software. GeneCluster 2 software is available from MIT Center for Genome Research at Whitehead Institute (e.g., wwwgenome.wi.mit.edu/cancer/software/genecluster2/gc2.html).

[0153] Both the weighted voting and k-nearest-neighbors algorithms employ gene classifiers that can effectively assign a patient of interest to an outcome class. By “effectively,” it means that the class assignment is statistically significant. In one example, the effectiveness of class assignment is evaluated by leave-one-out cross validation or k-fold cross validation. The prediction accuracy under these cross validation methods can be, for instance, at least 50%, 60%, 70%, 80%, 90%, 95%, or more. The prediction sensitivity or specificity under these cross validation methods can also be at least 50%, 60%, 70%, 80%, 90%, 95%, or more. Prognostic genes or class predictors with low assignment sensitivity/specificity or low cross validation accuracy, such as less than 50%, can also be used in the present invention.

[0154] Under one version of the weighted voting algorithm, each gene in a class predictor casts a weighted vote for one of the two classes (class 0 and class 1). The vote of gene “g” can be defined as v_{g}=a_{g} (x_{g}−b_{g}), wherein a_{g} equals to P(g,c) and reflects the correlation between the expression level of gene “g” and the class distinction between the two classes, b_{g} is calculated as b_{g}=[x0(g)+x1(g)]/2 and represents the average of the mean logs of the expression levels of gene “g” in class 0 and class 1, and x_{g} is the normalized log of the expression level of gene “g” in the sample of interest. A positive v_{g} indicates a vote for class 0, and a negative v_{g} indicates a vote for class 1. V0 denotes the sum of all positive votes, and V1 denotes the absolute value of the sum of all negative votes. A prediction strength PS is defined as PS=(V0−V1)/(V0+V1). Thus, the prediction strength varies between −1 and 1 and can indicate the support for one class (e.g., positive PS) or the other (e.g., negative PS). A prediction strength near “0” suggests narrow margin of victory, and a prediction strength close to “1” or “−1” indicates wide margin of victory. See Slonim, et al., PROCS. OF THE FOURTH ANNUAL INTERNATIONAL CONFERENCE ON COMPUTATIONAL MOLECULAR BIOLOGY, Tokyo, Japan, April 8-11, p 263-272 (2000); and Golub, et al., SCIENCE, 286: 531-537 (1999).

[0155] Suitable prediction strength (PS) thresholds can be assessed by plotting the cumulative cross-validation error rate against the prediction strength. In one embodiment, a positive predication is made if the absolute value of PS for the sample of interest is no less than 0.3. Other PS thresholds, such as no less than 0.1, 0.2, 0.4 or 0.5, can also be selected for class prediction. In many embodiments, a threshold is selected such that the accuracy of prediction is optimized and the incidence of both false positive and false negative results is minimized.

[0156] Any class predictor constructed according to the present invention can be used for the class assignment of a leukemia patient of interest. In many examples, a class predictor employed in the present invention includes n prognostic genes identified by the neighborhood analysis, where n is an integer greater than 1. A half of these prognostic genes has the largest P(g,c) scores, and the other half has the largest −P(g,c) scores. The number n therefore is the only free parameter in defining the class predictor.

[0157] The expression profile of a patient of interest can also be compared to two or more reference expression profiles by other means. For instance, the reference expression profiles can include an average peripheral blood expression profile for each class of patients. The fact that the expression profile of a patient of interest is more similar to one reference profile than to another suggests that the patient of interest is more likely to have the clinical outcome associated with the former reference profile than that associated with the latter reference profile.

[0158] In one particular embodiment, the present invention features prediction of clinical outcome of an AML patient of interest. AML patients can be divided into at least two classes based on their responses to a specified treatment regime. One class of patients (responders) has complete remission in response to the treatment, and the other class of patients (non-responders) has non-remission or partial remission in response to the treatment. AML prognostic genes that are correlated with a class distinction between these two classes of patients can be identified and then used to assign the patient of interest to one of these two outcome classes. Examples of AML prognostic genes suitable for this purpose are depicted in Tables 1 and 2.

[0159] In one example, the treatment regime includes administration of at least one chemotherapy agent (e.g., daunorubicin or cytarabine) and an anti-CD33 antibody conjugated with a cytotoxic agent (e.g., gemtuzumab ozogamicin), and the expression profile of an AML patient of interest is compared to two or more reference expression profiles by using a weighted voting or k-nearest-neighbors algorithm. All of these expression profiles are baseline profiles representing peripheral blood gene expression patterns prior to the treatment regime. A classifier including at least one gene selected from Table 1 and at least one gene selected from Table 2 can be employed for the outcome prediction. For instance, a classifier can include at least 1, 2, 3, 4, 5, 10, 15, 20, 25, 30, 35, 40, 45, 50, 55, 60, 65, 70, 75 or more genes selected from Table 1, and at least 1, 2, 3, 4, 5, 10, 15, 20, 25, 30, 35, 40, 45, 50, 55, 60, 65, 70, 75 or more genes selected from Table 2. The total number of genes selected from Table 1 can be equal to, or different from, that selected from Table 2.

[0160] Prognostic genes or class predictors capable of distinguishing three or more outcome classes can also be employed in the present invention. These prognostic genes can be identified using multi-class correlation metrics. Suitable programs for carrying out multi-class correlation analysis include, but are not limited to, GeneCluster 2 software (MIT Center for Genome Research at Whitehead Institute, Cambridge, Mass.). Under the analysis, patients having a specified type of leukemia are divided into at least three classes, and each class of patients has a different respective clinical outcome. The prognostic genes identified under multi-class correlation analysis are differentially expressed in PBMCs of one class of patients relative to PBMCs of other classes of patients. In one embodiment, the identified prognostic genes are correlated with a class distinction at above the 1%, 5%, 10%, 25%, or 50% significance level under a permutation test. The class distinction represents an idealized expression pattern of the identified genes in peripheral blood samples of patients who have different clinical outcomes.

[0161] For example, FIGS. 1A and 1B illustrate the identification and cross validation of gene classifiers for distinction of PBMCs from patients who did or did not respond to Mylotarg combination therapy. FIG. 1A shows the relative expression levels of 98 class-correlated genes. As graphically presented, 49 genes were elevated in responding patient PBMCs relative to non-responding patient PBMCs and the other 49 genes were elevated in non-responding patient PBMCs relative to responding patient PBMCs. FIG. 1B demonstrates cross validation results for each sample using a class predictor consisting of the 154 genes depicted in Tables 1 and 2. A leave-one out cross validation was performed and the prediction strengths were calculated for each sample. Samples are ordered in the same order as the nearest neighbor analysis in FIG. 1A.

[0162] The 154-gene classifier exhibited a sensitivity of 82%, correctly identifying 24 of the 28 true responders in the study. The gene classifier also exhibited a specificity of 75%, correctly identifying 6 of the 8 true non-responders in the study. Similar sensitivities, specificities and overall accuracies were observed with optimal gene classifiers identified by 10-fold and leave-one-out cross validation approaches.

[0163] The above investigation evaluated expression patterns in peripheral blood samples of AML patients prior to therapy and identified transcriptional signatures correlated with initial response to therapy. The result of this study demonstrates that pharmacogenomic peripheral blood profiling strategies enable identification of patients with high likelihoods of positive or negative outcomes in response to GO combination therapy.

### Diagnosis or Monitoring the Development, Progression or Treatment of AML

[0164] The above described methods, including preparation of blood samples, assembly of class predictors, and construction and comparison of expression profiles, can be readily adapted for the diagnosis or monitoring the development, progression or treatment of AML. This can be achieved by comparing the expression profile of one or more AML disease genes in a subject of interest to at least one reference expression profile of the AML disease gene(s). The reference expression profile(s) can include an average expression profile, or a set of individual expression profiles each of which represents the peripheral blood gene expression of the AML disease gene(s) in a particular AML patient or disease-free human. Similarity between the expression profile of the subject of interest and the reference expression profile(s) is indicative of the presence or absence or the disease state of AML. In many embodiments, the disease genes employed for AML diagnosis are selected from Table 7.

[0165] One or more AML disease genes selected from Table 7 can be used for AML diagnosis or disease monitoring. In one embodiment, each AML disease gene has a p-value of less than 0.01, 0.005, 0.001, 0.0005, 0.0001, or less. In another embodiment, the AML disease genes comprise at least one gene having an “AML/Disease-Free” ratio of no less than 2 and at least one gene having an “AML/Disease-Free” ratio of no more than 0.5.

[0166] The leukemia disease genes of the present invention can be used alone, or in combination with other clinical tests, for leukemia diagnosis or disease monitoring. Conventional methods for detecting or diagnosing leukemia include, but are not limited to, bone marrow aspiration, bone marrow biopsy, blood tests for abnormal levels of white blood cells, platelets or hemoglobin, cytogenetics, spinal tap, chest X-ray, or physical exam for swelling of the lymph nodes, spleen and liver. Any of these methods, as well as any other conventional or nonconventional method, can be used, in addition to the methods of the present invention, to improve the accuracy of leukemia diagnosis.

[0167] The present invention also features electronic systems useful for the prognosis, diagnosis or selection of treatment of AML or other leukemias. These systems include an input or communication device for receiving the expression profile of a patient of interest or the reference expression profile(s). The reference expression profile(s) can be stored in a database or other media. The comparison between expression profiles can be conducted electronically, such as through a processor or a computer. The processor or computer can execute one or more programs which compare the expression profile of the patient of interest to the reference expression profile(s). The programs can be stored in a memory or downloaded from another source, such as an internet server. In one example, the programs include a k-nearest-neighbors or weighted voting algorithm. In another example, the electronic system is coupled to a nucleic acid array and can receive or process expression data generated by the nucleic acid array.

### Kits for Prognosis, Diagnosis or Selection of Treatment of Leukemia

[0168] In addition, the present invention features kits useful for the prognosis, diagnosis or selection of treatment of AML or other leukemias. Each kit includes or consists essentially of at least one probe for a leukemia prognosis or disease gene (e.g., a gene selected from Tables 1, 2, 3, 4, 5, 6, 7, 8 or 9). Reagents or buffers that facilitate the use of the kit can also be included. Any type of probe can be using in the present invention, such as hybridization probes, amplification primers, or antibodies.

[0169] In one embodiment, a kit of the present invention includes or consists essentially of at least 1, 2, 3, 4, 5, 6, 7, 8, 9, 10, or more polynucleotide probes or primers. Each probe/primer can hybridize under stringent conditions or nucleic acid array hybridization conditions to a different respective leukemia prognosis or disease gene. As used herein, a polynucleotide can hybridize to a gene if the polynucleotide can hybridize to an RNA transcript, or the complement thereof, of the gene. In another embodiment, a kit of the present invention includes one or more antibodies, each of which is capable of binding to a polypeptide encoded by a different respective leukemia prognosis or disease gene.

[0170] In one example, a kit of the present invention includes or consists essentially of probes (e.g., hybridization or PCR amplification probes or antibodies) for at least 1, 2, 3, 4, 5, 10, 15, 20, 25, 30, 35, 40, 45, 50, 55, 60, 65, 70, 75 or more genes selected from Table 2a, and probes for at least 1, 2, 3, 4, 5, 10, 15, 20, 25, 30, 35, 40, 45, 50, 55, 60, 65, 70, 75 or more genes selected from Table 2b. The total number of probes for the genes selected from Table 2a can be identical to, or different from, that for the genes selected from Table 2b.

[0171] The probes employed in the present invention can be either labeled or unlabeled. Labeled probes can be detectable by spectroscopic, photochemical, biochemical, bioelectronic, immunochemical, electrical, optical, chemical, or other suitable means. Exemplary labeling moieties for a probe include radioisotopes, chemiluminescent compounds, labeled binding proteins, heavy metal atoms, spectroscopic markers, such as fluorescent markers and dyes, magnetic labels, linked enzymes, mass spectrometry tags, spin labels, electron transfer donors and acceptors, and the like.

[0172] The kits of the present invention can also have containers containing buffer(s) or reporter means. In addition, the kits can include reagents for conducting positive or negative controls. In one embodiment, the probes employed in the present invention are stably attached to one or more substrate supports. Nucleic acid hybridization or immunoassays can be directly carried out on the substrate support(s). Suitable substrate supports for this purpose include, but are not limited to, glasses, silica, ceramics, nylons, quartz wafers, gels, metals, papers, beads, tubes, fibers, films, membranes, column matrices, or microtiter plate wells. The kits of the present invention may also contain one or more controls, each representing a reference expression level of a prognostic or diagnostic gene detectable by one or more probes contained in the kits.

[0173] The present invention also allows for personalized treatment of AML or other leukemias. Numerous treatment options or regimes can be analyzed according to the present invention to identify prognostic genes for each treatment regime. The peripheral blood expression profiles of these prognostic genes in a patient of interest are indicative of the clinical outcome of the patient and, therefore, can be used for the selection of treatments that have favorable prognoses for the patient. As used herein, a “favorable” prognosis is a prognosis that is better than the prognoses of the majority of all other available treatments for the patient of interest. The treatment regime with the best prognosis can also be identified.

[0174] Treatment selection can be conducted manually or electronically. Reference expression profiles or gene classifiers can be stored in a database. Programs capable of performing algorithms such as the k-nearest-neighbors or weighted voting algorithms can be used to compare the peripheral blood expression profile of a patient of interest to the database to determine which treatment should be used for the patient.

[0175] It should be understood that the above-described embodiments and the following examples are given by way of illustration, not limitation. Various changes and modifications within the scope of the present invention will become apparent to those skilled in the art from the present description.

### EXAMPLES

### Example 1

### Clinical Trial and Data Collection

### Experimental Design

[0176] AML patients (13 females and 23 males) were exclusively of Caucasian descent and had a median age of 45 years (range of 19-66 years). Inclusion criteria for AML patients included blasts in excess of 20% in the bone marrow, morphologic diagnosis of AML according to the FAB classification system and flow cytometry analysis indicating positive CD33+ status. Participation in the clinical trial required concordant pathological diagnosis of AML by both an onsite pathologist following histological evaluation of bone marrow aspirates. A summary of the cytogenetic characteristics of the patients is presented in Table 11.

TABLE 11
Cytogenetic characteristics of PG consented AML patients
contributing baseline samples in 0903B1-206-US.

| | PG Consented |
|---|---|
| Cytogenetic Characteristic(s) | (n = 36)* |
| Normal karyotype | 12 (33%) |
| Complex karyotype (>3 abnormalities) | 6 (17%) |
| Other | 6 (17%) |
| +8 | 4 (11%) |
| not determined | 3 (8%) |
| −7 | 3 (8%) |
| inv (16) | 3 (8%) |
| −5q | 2 (6%) |
| −7q | 1 (3%) |
| −5q | 1 (3%) |
| t (11; 17) | 1 (3%) |
| +11 | 1 (3%) |
| 11q23 aberration | 1 (3%) |

[0177] All patients received the following standard course of induction chemotherapy and were then evaluated at 36 days. On Days 1 through 7, patients received continuous infusion cytarabine at 100 mg/m²/day. Daunorubicin was given intravenously (IV bolus) on Days 1 through 3 at 45 mg/m². On Day 4, gemtuzumab ozogamicin (6 mg/m²) was administered over approximately 2 hours as an IV infusion.

### Purification and Storage of PBMCs

[0178] All disease-free and AML peripheral blood samples were shipped overnight and processed to PBMCs by a Ficoll-gradient purification. Cell counts in whole blood and in the isolated PBMC pellets were measured by hematology analyzers and isolated PBMCs were stored at −80° C. until the RNA was extracted from these samples.

### RNA Extraction

[0179] RNA extraction was performed according to a modified RNeasy mini kit method (Qiagen, Valencia, Calif., USA). Briefly, PBMC pellets were digested in RLT lysis buffer containing 0.1% beta-mercaptoethanol and processed for total RNA isolation using the RNeasy mini kit. A phenol:chloroform extraction was then performed, and the RNA was repurified using the Rneasy mini kit reagents. Eluted RNA was quantified using a Spectramax 96 well plate UV reader (Molecular Devices, Sunnyvale, Calif., USA) monitoring A260/280 OD values. The quality of each RNA sample was assessed by gel electrophoresis.

### RNA Amplification and Generation of GeneChip Hybridization Probe

[0180] Labeled targets for oligonucleotide arrays were prepared according to a standard laboratory method. In brief, two micrograms of total RNA were converted to cDNA using an oligo-(dT)24 primer containing a T7 DNA polymerase promoter at the 5′ end. The cDNA was used as the template for in vitro transcription using a T7 DNA polymerase kit (Ambion, Woodlands, Tex., USA) and biotinylated CTP and UTP (Enzo, Farmingdale, N.Y., USA). Labeled cRNA was fragmented in 40 mM Tris-acetate pH 8.0, 100 mM KOAc, 30 mM MgOAc for 35 min at 94° C. in a final volume of 40 mL. Ten micrograms of labeled target were diluted in 1×MES buffer with 100 mg/mL herring sperm DNA and 50 mg/mL acetylated BSA. In vitro synthesized transcripts of 11 bacterial genes were included in each hybridization reaction. The abundance of these transcripts ranged from 1:300000 (3 ppm) to 1:1000 (1000 ppm) stated in terms of the number of control transcripts per total transcripts. Labeled probes were denatured at 99° C. for 5 min and then 45° C. for 5 min and hybridized to HG_U133A oligonucleotide arrays comprised of over 22000 human genes (Affymetrix, Santa Clara, Calif., USA) according to the Affymetrix GeneChip Analysis Suite User Guide (Affymetrix). Arrays were hybridized for 16 h at 45° C. with rotation at 60 rpm. After hybridization, the hybridization mixtures were removed and stored, and the arrays were washed and stained with streptavidin R-phycoerythrin (Molecular Probes) using the GeneChip Fluidics Station 400 (Affymetrix) and scanned with an HP GeneArray Scanner (Hewlett Packard, Palo Alto, Calif., USA) following the manufacturer's instructions. These hybridization and wash conditions are collectively referred to as “nucleic acid array hybridization conditions.”

### Generation of Affymetrix Signals

[0181] Array images were processed using the Affymetrix MicroArray Suite (MAS5) software such that raw array image data (.dat) files produced by the array scanner were reduced to probe feature-level intensity summaries (.cel files) using the desktop version of MAS5. Using the Gene Expression Data System (GEDS) as a graphical user interface, users provided a sample description to the Expression Profiling Information and Knowledge System (EPIKS) Oracle database and associated the correct .cel file with the description. The database processes then invoked the MAS5 software to create probeset summary values; probe intensities were summarized for each sequence using the Affymetrix Affy Signal algorithm and the Affymetrix Absolute Detection metric (Absent, Present, or Marginal) for each probeset. MAS5 was also used for the first pass normalization by scaling the trimmed mean to a value of 100. The “average difference” values for each transcript were normalized to “frequency” values using the scaled frequency normalization method (Hill, et al., Genome Biol., 2(12):research0055.1-0055.13 (2001)) in which the average differences for 11 control cRNAs with known abundance spiked into each hybridization solution were used to generate a global calibration curve. This calibration was then used to convert average difference values for all transcripts to frequency estimates, stated in units of parts per million ranging from 1:300,000 (3 parts per million (ppm)) to 1:1000 (1000 ppm) The database processes also calculated a series of chip quality control metrics and stored all the raw data and quality control calculations in the database. Only hybridized samples passing QC criteria were included in the analysis.

### Example 2

### Disease-Associated Transcripts in AML PBMCs

[0182] U133A-derived transcriptional profiles of the 36 AML PBMC samples were co-normalized using the scaled frequency normalization method with 20 MDS PBMC and 45 healthy volunteer PBMC. A total of 7879 transcripts were detected in one or more profiles with a maximal frequency greater than or equal to 10 ppm (denoted as 1 P, 1≧10 ppm) across the profiles.

[0183] To identify AML-associated transcripts, average fold differences between AML and normal PBMCs were calculated by dividing the mean level of expression in the AML profiles by the mean level of expression in normal profiles. A Student's t-test (two-sample, unequal variance) was used to assess the significance of the difference in expression between the groups.

[0184] For unsupervised hierarchical clustering, the 7879 transcripts meeting the expression filter 1P, 1≧10 ppm were used. Data were log transformed and gene expression values were median centered, and profiles were clustered using an average linkage clustering approach with an uncentered correlation similarity metric.

[0185] Unsupervised analysis using hierarchical clustering demonstrated that PBMCs from AML, MDS and normal healthy individuals clustered into two main clusters, with the first subgroup composed exclusively of normal PBMCs and a second subgroup composed of AML, MDS and normal PBMCs (FIG. 2). The second subgroup broke further into two distinguishable subclusters composed of an AML-like cluster populated mainly with AML PBMC profiles, an MDS-like cluster populated mainly with MDS PBMC profiles.

[0186] AML-associated transcripts in peripheral blood were identified by comparing mean levels of expression in PBMCs from the group of healthy volunteers (n=45) with mean levels of expression in PBMCs from the AML patients (n=36). The numbers of transcripts exhibiting at least a 2-fold average difference between normal and AML PBMCs at increasing levels of significance are presented in Table 12. A total of 660 transcripts possessed at least an average 2-fold difference between the AML profiles and normal PBMC profiles and a significance in an unpaired Student's t-test less than 0.001. These transcripts are presented in Table 7, above. Of these, 382 transcripts exhibited a mean elevated level of expression 2 fold or higher in AML and the fifty genes with the greatest fold elevation are presented in Table 8. A total of 278 transcripts exhibited a mean reduced level of expression 2-fold or lower in AML and the fifty genes with the greatest fold reduction in AML are presented in Table 9.

TABLE 12
Numbers of two-fold changed genes between AML and
disease-free PBMCs meeting increasing levels of significance

| | No. of transcripts with average 2-fold |
|---|---|
| Significance Level | change in AML PBMCs |
| p < 1 × 10-3 | 660 |
| p < 1 × 10-4 | 575 |
| p < 1 × 10-5 | 491 |
| p < 1 × 10-6 | 407 |
| p < 1 × 10-7 | 319 |
| p < 1 × 10-8 | 264 |
| p < 1 × 10-9 | 218 |

[0187] In these studies a total of 382 transcripts possessed significantly higher levels of expression in AML PBMCs. Elevated levels of expression may be due to 1) increased transcriptional activation in circulating PBMCs or 2) elevated levels of certain subtypes of cells in circulating PBMCs. Many of the transcripts that are elevated in AML PBMCs in this study appear to be contributed by leukemic blasts present in the peripheral circulation of these patients. Many of the transcripts are known to be specifically expressed and/or linked to disease-processes in immature or leukemic blasts (myeloperoxidase, v-myb myeloblastosis proto-oncogene, v-kit proto-oncogene, fms-related tyrosine kinase 3, CD34). In addition, many of the transcripts with the highest level of expression in AML PBMCs are at undetectable or extremely low levels in purified populations of monocytes, B-cells, T-cells, and neutrophils (data not shown) and were classified as low expressors in a healthy volunteer observational study. Thus the majority of transcripts observed to present in higher quantitites in AML PBMCs do not appear to be mainly due to transcriptional activation but rather due to the presence of leukemic blasts in the circulation of AML patients.

[0188] Conversely, disease-associated transcripts at significantly lower levels in AML PBMCs appear to be transcripts exhibiting high levels of expression in one or more of the normal types of cells typically isolated by cell-purification tubes (monocytes, B-cells, T-cells, and copurifying neutrophils). For instance, eight of the top ten transcripts at lower levels in AML PBMCs possess average levels of expression in their respective purified cell type of greater than 50 ppm, and were classified as high expressors in a healthy volunteer observational study. Thus the majority of transcripts observed to be present in lower quantities in AML PBMCs do not appear to be mainly due to transcriptional repression but rather due to the decreased presence of normal mononuclear cells in the blast-rich circulation of patients with AML.

### Example 3

### Transcriptional Effects of Therapy

[0189] A total of 27 AML patients provided evaluable baseline and Day 36 post-treatment PBMC samples. The U133A-derived transcriptional profiles of the 27 paired AML PBMC samples were co-normalized using the scaled frequency normalization method. A total of 8809 transcripts were detected in one or more profiles with a maximal frequency greater than or equal to 10 ppm (denoted as 1P, 1≧10 ppm) across the profiles.

[0190] To identify transcripts altered during the course of therapy, average fold differences between Day 0 and Day 36 PBMC profiles were calculated by dividing the mean level of expression in the baseline Day 0 profiles by the mean level of expression in the post-treatment Day 36 profiles. A Student's t-test (two-sample, unequal variance) was used to assess the significance of the difference in expression between the groups.

[0191] GO-based therapy-associated transcripts in peripheral blood were identified by comparing mean levels of expression in PMBCs from baseline samples (n=27) with mean levels of expression in PBMCs from the paired post-treatment samples (n=27) from the same AML patients. The numbers of transcripts exhibiting at least a 2-fold average difference between baseline and post-treatment PBMCs with increasing levels of significance are presented in Table 13. A total of 607 transcripts possessed at least an average 2-fold difference between the baseline and post-treatment samples, and significance in a paired Student's t-test of less than 0.001. Of these, 348 transcripts exhibited a mean reduced level of expression 2-fold or greater over the course of therapy and the fifty genes with the greatest fold reduction following GO therapy are presented in Table 14. A total of 259 transcripts exhibited a mean elevated level of expression 2-fold or greater over the course of therapy and the fifty genes with the greatest fold elevation following GO therapy are presented in Table 15. The genes most strongly altered over the course of therapy (mean induction or repression of 3-fold or greater) were annotated with respect to their cellular functions according to their Gene Ontology annotation and the percent of transcripts in each category are presented in FIG. 3.

TABLE 13
Numbers of two-fold changed genes between Day 0 (baseline) and
Day 36 (final visit) meeting increasing levels of significance

| | No. of transcripts with average |
|---|---|
| | 2-fold change between |
| Significance Level | baseline (Day 0) and final visit (Day 36) |
| p < 1 × 10-3 | 607 |
| p < 1 × 10-4 | 451 |
| p < 1 × 10-5 | 272 |
| p < 1 × 10-6 | 122 |
| p < 1 × 10-7 | 38 |
| p < 1 × 10-8 | 16 |
| p < 1 × 10-9 | 5 |

TABLE 14
Top 50 transcripts significantly repressed (p < 0.001)
in AML PBMCs following 36-day therapy regimen

| | | | | Fold Diff | |
|---|---|---|---|---|---|
| | | | | (Final/ | p-value |
| Affymetrix ID | Name | Cyto Band | Unigene ID | Baseline) | (unequal) |
| 205051_s_at | v-kit Hardy-Zuckerman 4 | 4q11-q12 | Hs.81665 | 0.13 | 3.02E−06 |
| | feline sarcoma viral | | | | |
| | oncogene homolog | | | | |
| 206310_at | serine protease inhibitor, | 4q11 | Hs.98243 | 0.14 | 1.06E−04 |
| | Kazal type, 2 (acrosin- | | | | |
| | trypsin inhibitor) | | | | |
| 209905_at | homeo box A9 | 7p15-p14 | Hs.127428 | 0.14 | 6.28E−04 |
| 209160_at | aldo-keto reductase | 10p15-p14 | Hs.78183 | 0.15 | 1.71E−04 |
| | family 1, member C3 (3- | | | | |
| | alpha hydroxysteroid | | | | |
| | dehydrogenase, type II) | | | | |
| 215382_x_at | tryptase beta 1, tryptase, | 16p13.3 | Hs.347933 | 0.15 | 8.80E−04 |
| | alpha | | | | |
| 204798_at | v-myb myeloblastosis | 6q22-q23 | Hs.1334 | 0.16 | 4.65E−07 |
| | viral oncogene homolog | | | | |
| | (avian) | | | | |
| 207741_x_at | tryptase, alpha | 16p13.3 | Hs.334455 | 0.16 | 7.19E−04 |
| 214651_s_at | homeo box A9 | 7p15-p14 | Hs.127428 | 0.16 | 2.12E−04 |
| 205131_x_at | stem cell growth factor; | 19q13.3 | Hs.105927 | 0.16 | 3.08E−05 |
| | lymphocyte secreted C- | | | | |
| | type lectin | | | | |
| 211709_s_at | stem cell growth factor; | 19q13.3 | Hs.105927 | 0.16 | 3.85E−06 |
| | lymphocyte secreted C- | | | | |
| | type lectin | | | | |
| 219054_at | hypothetical protein | 5p13.2 | Hs.13528 | 0.17 | 1.19E−05 |
| | FLJ14054 | | | | |
| 203948_s_at | myeloperoxidase | 17q23.1 | Hs.1817 | 0.17 | 1.36E−04 |
| 203949_at | myeloperoxidase | 17q23.1 | Hs.1817 | 0.17 | 2.81E−05 |
| 204304_s_at | prominin-like 1 (mouse) | 4p15.33 | Hs.112360 | 0.17 | 3.79E−05 |
| 201892_s_at | IMP (inosine | 3p21.2 | Hs.75432 | 0.18 | 8.66E−07 |
| | monophosphate) | | | | |
| | dehydrogenase 2 | | | | |
| 219837_s_at | cytokine-like protein C17 | 4p16-p15 | Hs.13872 | 0.18 | 5.00E−04 |
| 206674_at | fms-related tyrosine | 13q12 | Hs.385 | 0.18 | 1.01E−06 |
| | kinase 3 | | | | |
| 201416_at | Meis1, myeloid ecotropic | 17p11.2, | Hs.83484 | 0.18 | 8.38E−04 |
| | viral integration site 1 | 6p22.3 | | | |
| | homolog 3 (mouse), SRY | | | | |
| | (sex determining region | | | | |
| | Y)-box 4 | | | | |
| 221004_s_at | integral membrane | 2q37 | Hs.111577 | 0.20 | 6.77E−05 |
| | protein 3 | | | | |
| 211743_s_at | proteoglycan 2, bone | 11q12 | Hs.99962 | 0.20 | 9.21E−04 |
| | marrow (natural killer cell | | | | |
| | activator, eosinophil | | | | |
| | granule major basic | | | | |
| | protein) | | | | |
| 205609_at | angiopoietin 1 | 8q22.3-q23 | Hs.2463 | 0.21 | 3.50E−05 |
| 210783_x_at | stem cell growth factor; | 19q13.3 | Hs.105927 | 0.22 | 8.73E−05 |
| | lymphocyte secreted C- | | | | |
| | type lectin | | | | |
| 218788_s_at | hypothetical protein | 1q44 | Hs.8109 | 0.22 | 3.92E−06 |
| | FLJ21080 | | | | |
| 209790_s_at | caspase 6, apoptosis- | 4q25 | Hs.3280 | 0.23 | 2.24E−04 |
| | related cysteine protease | | | | |
| 202589_at | thymidylate synthetase | 18p11.32 | Hs.82962 | 0.24 | 3.96E−04 |
| 201418_s_at | Meis1, myeloid ecotropic | 17p11.2, | Hs.83484 | 0.24 | 7.62E−05 |
| | viral integration site 1 | 6p22.3 | | | |
| | homolog 3 (mouse), SRY | | | | |
| | (sex determining region | | | | |
| | Y)-box 4 | | | | |
| 201459_at | RuvB-like 2 (E. coli) | 19q13.3 | Hs.6455 | 0.24 | 8.40E−06 |
| 209757_s_at | v-myc myelocytomatosis | 2p24.1 | Hs.25960 | 0.25 | 1.59E−04 |
| | viral related oncogene, | | | | |
| | neuroblastoma derived | | | | |
| | (avian) | | | | |
| 213258_at | unknown | N/A | Hs.288582 | 0.25 | 1.55E−05 |
| 212115_at | hypothetical protein | 16p13.11 | Hs.172035 | 0.25 | 3.00E−04 |
| | FLJ13092 | | | | |
| 204040_at | KIAA0161 gene product | 2p25.3 | Hs.78894 | 0.26 | 4.12E−07 |
| 218858_at | hypothetical protein | 8q12.2 | Hs.87729 | 0.26 | 5.84E−04 |
| | FLJ12428 | | | | |
| 205899_at | cyclin A1 | 13q12.3-q13 | Hs.79378 | 0.26 | 4.58E−04 |
| 201310_s_at | P311 protein | 5q21.3 | Hs.142827 | 0.26 | 2.90E−06 |
| 206589_at | growth factor | 1p22 | Hs.73172 | 0.27 | 1.28E−05 |
| | independent 1 | | | | |
| 222036_s_at | MCM4 minichromosome | 8q12-q13 | Hs.154443 | 0.28 | 4.13E−04 |
| | maintenance deficient 4 | | | | |
| | (S. cerevisiae) | | | | |
| 201596_x_at | keratin 18 | 12q13 | Hs.65114 | 0.28 | 5.76E−04 |
| 201162_at | insulin-like growth factor | 4q12 | Hs.119206 | 0.28 | 2.51E−06 |
| | binding protein 7 | | | | |
| 203787_at | single-stranded DNA | 5q14.1 | Hs.169833 | 0.29 | 7.97E−05 |
| | binding protein 2 | | | | |
| 219218_at | hypothetical protein | 17q25.3 | Hs.98968 | 0.29 | 1.32E−04 |
| | FLJ23058 | | | | |
| 220416_at | KIAA1939 protein | 15q15.2 | Hs.182738 | 0.29 | 5.92E−05 |
| 201307_at | hypothetical protein | 4q13.3 | Hs.8768 | 0.29 | 1.17E−05 |
| | FLJ10849 | | | | |
| 201841_s_at | heat shock 27 kD protein 1 | 7p12.3 | Hs.76067 | 0.30 | 7.13E−04 |
| 209360_s_at | runt-related transcription | 21q22.3 | Hs.129914 | 0.30 | 1.79E−05 |
| | factor 1 (acute myeloid | | | | |
| | leukemia 1; aml1 | | | | |
| | oncogene) | | | | |
| 202502_at | acyl-Coenzyme A | 1p31 | Hs.79158 | 0.31 | 1.62E−06 |
| | dehydrogenase, C-4 to | | | | |
| | C-12 straight chain | | | | |
| 202503_s_at | KIAA0101 gene product | 15q22.1 | Hs.81892 | 0.31 | 3.51E−04 |
| 201930_at | MCM6 minichromosome | 2q21 | Hs.155462 | 0.31 | 1.36E−05 |
| | maintenance deficient 6 | | | | |
| | (MIS5 homolog, S. pombe) | | | | |
| | (S. cerevisiae) | | | | |
| 201417_at | unknown | N/A | N/A | 0.31 | 1.07E−04 |
| 202746_at | unknown | N/A | N/A | 0.32 | 6.07E−04 |
| 212009_s_at | stress-induced- | 11q13 | Hs.75612 | 0.32 | 4.03E−06 |
| | phosphoprotein 1 | | | | |
| | (Hsp70/Hsp90- | | | | |
| | organizing protein) | | | | |

TABLE 15
Top 50 transcripts significantly elevated (p < 0.001) in AML PBMCs following
36-day therapy regimen

| | | | | Fold Diff | |
|---|---|---|---|---|---|
| | | Cyto | | (Final/ | p-value |
| Affymetrix ID | Name | Band | Unigene ID | Baseline) | (unequal) |
| 201506_at | transforming growth | 5q31 | Hs.118787 | 7.89 | 9.88E−09 |
| | factor, beta-induced, | | | | |
| | 68 kD | | | | |
| 210244_at | cathelicidin antimicrobial | 3p21.3 | Hs.51120 | 7.53 | 2.43E−05 |
| | peptide | | | | |
| 203887_s_at | thrombomodulin | 20p12-cen | Hs.2030 | 6.84 | 3.15E−07 |
| 202437_s_at | cytochrome P450, | 2p21 | Hs.154654 | 6.25 | 1.56E−04 |
| | subfamily I (dioxin- | | | | |
| | inducible), polypeptide 1 | | | | |
| | (glaucoma 3, primary | | | | |
| | infantile) | | | | |
| 212531_at | lipocalin 2 (oncogene | 9q34 | Hs.204238 | 6.05 | 6.81E−05 |
| | 24p3) | | | | |
| 206343_s_at | neuregulin 1 | 8p21-p12 | Hs.172816 | 5.25 | 1.02E−06 |
| 203888_at | thrombomodulin | 20p12-cen | Hs.2030 | 5.12 | 1.46E−06 |
| 210512_s_at | vascular endothelial | 6p12 | Hs.73793 | 5.05 | 3.55E−07 |
| | growth factor | | | | |
| 202436_s_at | cytochrome P450, | 2p21 | Hs.154654 | 4.93 | 2.11E−04 |
| | subfamily I (dioxin- | | | | |
| | inducible), polypeptide 1 | | | | |
| | (glaucoma 3, primary | | | | |
| | infantile) | | | | |
| 203821_at | diphtheria toxin receptor | 5q23 | Hs.799 | 4.89 | 2.64E−07 |
| | (heparin-binding | | | | |
| | epidermal growth factor- | | | | |
| | like growth factor) | | | | |
| 206881_s_at | leukocyte | 19q13.4 | Hs.113277 | 4.76 | 2.08E−06 |
| | immunoglobulin-like | | | | |
| | receptor, subfamily A | | | | |
| | (without TM domain), | | | | |
| | member 3 | | | | |
| 205237_at | ficolin | 9q34 | Hs.252136 | 4.64 | 1.21E−08 |
| | (collagen/fibrinogen | | | | |
| | domain containing) 1 | | | | |
| 208146_s_at | carboxypeptidase, | 7p15-p14 | Hs.95594 | 4.53 | 9.53E−09 |
| | vitellogenic-like | | | | |
| 220532_s_at | LR8 protein | 7q35 | Hs.190161 | 4.51 | 6.60E−04 |
| 38037_at | diphtheria toxin receptor | 5q23 | Hs.799 | 4.36 | 1.13E−06 |
| | (heparin-binding | | | | |
| | epidermal growth factor- | | | | |
| | like growth factor) | | | | |
| 201566_x_at | inhibitor of DNA binding | 2p25 | Hs.180919 | 4.31 | 1.15E−08 |
| | 2, dominant negative | | | | |
| | helix-loop-helix protein | | | | |
| 203435_s_at | membrane metallo- | 3q25.1-q25.2 | Hs.1298 | 4.20 | 9.64E−04 |
| | endopeptidase (neutral | | | | |
| | endopeptidase, | | | | |
| | enkephalinase, CALLA, | | | | |
| | CD10) | | | | |
| 213524_s_at | putative lymphocyte | 1q32.2-q41 | Hs.95910 | 4.17 | 7.96E−08 |
| | G0/G1 switch gene | | | | |
| 205174_s_at | glutaminyl-peptide | 2p22.3 | Hs.79033 | 4.11 | 2.91E−10 |
| | cyclotransferase | | | | |
| | (glutaminyl cyclase) | | | | |
| 204115_at | guanine nucleotide | 7q31-q32 | Hs.83381 | 4.10 | 1.06E−05 |
| | binding protein 11 | | | | |
| 221211_s_at | chromosome 21 open | 21q22.3 | Hs.41267 | 3.99 | 7.25E−06 |
| | reading frame 7 | | | | |
| 202018_s_at | lactotransferrin | 3q21-q23 | Hs.105938 | 3.98 | 2.62E−04 |
| 211924_s_at | plasminogen activator, | 19q13 | Hs.179657 | 3.86 | 2.20E−07 |
| | urokinase receptor | | | | |
| 204006_s_at | Fc fragment of IgG, low | 1q23 | Hs.372679 | 3.75 | 1.62E−04 |
| | affinity IIIa, receptor for | | | | |
| | (CD16), Fc fragment of | | | | |
| | IgG, low affinity IIIb, | | | | |
| | receptor for (CD16) | | | | |
| 201565_s_at | inhibitor of DNA binding | 2p25 | Hs.180919 | 3.68 | 4.06E−10 |
| | 2, dominant negative | | | | |
| | helix-loop-helix protein | | | | |
| 206130_s_at | asialoglycoprotein | 17p | Hs.1259 | 3.65 | 1.56E−05 |
| | receptor 2 | | | | |
| 203979_at | cytochrome P450, | 2q33-qter | Hs.82568 | 3.57 | 3.78E−04 |
| | subfamily XXVIIA (steroid | | | | |
| | 27-hydroxylase, | | | | |
| | cerebrotendinous | | | | |
| | xanthomatosis), | | | | |
| | polypeptide 1 | | | | |
| 206390_x_at | platelet factor 4 | 4q12-q21 | Hs.81564 | 3.57 | 9.97E−06 |
| 210146_x_at | leukocyte | 19q13.4 | Hs.22405 | 3.49 | 5.04E−08 |
| | immunoglobulin-like | | | | |
| | receptor, subfamily B | | | | |
| | (with TM and ITIM | | | | |
| | domains), member 2 | | | | |
| 204112_s_at | histamine N- | 2q21.1 | Hs.81182 | 3.49 | 1.30E−06 |
| | methyltransferase | | | | |
| 211135_x_at | leukocyte | 19q13.4 | Hs.105928 | 3.49 | 4.18E−07 |
| | immunoglobulin-like | | | | |
| | receptor, subfamily B | | | | |
| | (with TM and ITIM | | | | |
| | domains), member 3 | | | | |
| 208601_s_at | tubulin, beta 1 | 20q13.32 | Hs.303023 | 3.45 | 3.68E−04 |
| 210845_s_at | plasminogen activator, | 19q13 | Hs.179657 | 3.42 | 1.72E−09 |
| | urokinase receptor | | | | |
| 211527_x_at | vascular endothelial | 6p12 | Hs.73793 | 3.40 | 1.08E−05 |
| | growth factor | | | | |
| 221210_s_at | chromosome 1 open | 1q25 | Hs.23756 | 3.40 | 2.18E−07 |
| | reading frame 13 | | | | |
| 201393_s_at | insulin-like growth factor | 6q26 | Hs.76473 | 3.40 | 1.75E−06 |
| | 2 receptor | | | | |
| 205568_at | aquaporin 9 | 15q22.1-22.2 | Hs.104624 | 3.33 | 3.73E−05 |
| 221698_s_at | C-type (calcium | 12p13.2-p12.3 | Hs.161786 | 3.33 | 1.08E−06 |
| | dependent, | | | | |
| | carbohydrate-recognition | | | | |
| | domain) lectin, | | | | |
| | superfamily member 12 | | | | |
| 204081_at | neurogranin (protein | 11q24 | Hs.26944 | 3.31 | 2.29E−05 |
| | kinase C substrate, RC3) | | | | |
| 206359_at | suppressor of cytokine | 17q25.3 | Hs.345728 | 3.28 | 1.70E−07 |
| | signaling 3 | | | | |
| 219593_at | peptide transporter 3 | 11q13.1 | Hs.237856 | 3.27 | 6.44E−07 |
| 204007_at | Fc fragment of IgG, low | 1q23 | Hs.176663 | 3.26 | 3.24E−04 |
| | affinity IIIa, receptor for | | | | |
| | (CD16) | | | | |
| 201739_at | serum/glucocorticoid | 6q23 | Hs.296323 | 3.21 | 9.28E−08 |
| | regulated kinase | | | | |
| 203645_s_at | CD163 antigen | 12p13.3 | Hs.74076 | 3.20 | 3.41E−04 |
| 203414_at | monocyte to macrophage | 17q | Hs.79889 | 3.16 | 5.41E−09 |
| | differentiation-associated | | | | |
| 214696_at | hypothetical protein | 17p13.3 | Hs.29206 | 3.16 | 4.12E−08 |
| | MGC14376 | | | | |
| 210225_x_at | leukocyte | 19q13.4 | Hs.105928 | 3.13 | 1.37E−06 |
| | immunoglobulin-like | | | | |
| | receptor, subfamily B | | | | |
| | (with TM and ITIM | | | | |
| | domains), member 3 | | | | |
| 203561_at | Fc fragment of IgG, low | 1q23 | Hs.78864 | 3.11 | 1.83E−06 |
| | affinity IIa, receptor for | | | | |
| | (CD32) | | | | |
| 218454_at | hypothetical protein | 12p13.31 | Hs.178470 | 3.10 | 1.67E−07 |
| | FLJ22662 | | | | |
| 221724_s_at | C-type (calcium | 12p13 | Hs.115515 | 3.08 | 1.10E−08 |
| | dependent, | | | | |
| | carbohydrate-recognition | | | | |
| | domain) lectin, | | | | |
| | superfamily member 6 | | | | |

[0192] Comparison of pre- and post-treatment PBMC profiles from AML patients revealed a large number of differences in transcript levels over the course of therapy. Annotation of the genes apparently repressed over the course of therapy using Gene Ontology annotation (see FIG. 3) demonstrated that many of the transcripts at lower levels following therapy fell into an uncharacterized category. Further evaluation revealed that the vast majority of these transcripts were disease associated and were present at lower quantities in post-treatment samples due to the disappearance of leukemic blasts in these patients following therapy. Consistent with this observation, forty-five of the top 50 transcripts down-regulated following the GO regimen were disease (blast)-associated genes. Thus the down-regulation of v-kit, tryptase, aldo-keto reductase 1C3, homeobox A9, meis1, myeloperoxidase, and the majority of other transcripts exhibiting the greatest fold reduction appear to be due to the disappearance of leukemic blasts in the circulation, rather than direct transcriptional effects of the chemotherapy regimen.

[0193] Evaluation of the transcripts in PBMCs at higher levels following therapy revealed the opposite trend and showed that the vast majority of these transcripts were associated with normal PBMC expression and were present at higher quantities in post-treatment samples due to the reappearance of normal mononuclear cells in the majority of treated patients. A total of thirty-one of the top 50 transcripts up-regulated following the GO regimen were transcripts associated with normal mononuclear cell expression. Thus the up-regulation of the TGF-beta induced protein (68 kDa), thrombomodulin, putative lymphocyte G0/G1 switch gene, and the majority of other transcripts are likely due to the disappearance of leukemic blasts and repopulation of normal cells in the circulation, rather than direct transcriptional effects of the chemotherapy regimen.

[0194] For a smaller number of genes, transcriptional activation or repression may be the cause for differences in transcript levels. For instance, cytochrome P4501A1 (CYP1A1) is induced following therapy but is not significantly associated with normal mononuclear cell expression (i.e., CYP1A1 was not significantly repressed in AML PBMCs compared to normal PBMCs). CYP1A1 is involved in the metabolism of daunorubicin, and daunorubicin is a mechanism-based inactivator of CYP1A1 activity. Thus the elevation of CYP1A1mRNA may represent a feedback transcriptional response to the present therapeutic regimen. Interferon-inducible proteins were also elevated during the course of therapy (interferon-inducible protein 30, interferon-induced transmembrane protein 2), and these effects may also represent transcriptional inductions of interferon-dependent signaling pathways activated during the course of therapy.

[0195] Whether due to disappearance of blasts, elevations in normal cell counts or actual transcriptional activation or repression, alterations in several of the PBMC transcripts may have functional consequences on the progression of AML. TGF-beta induces cell cycle arrest and antagonizes FLT3-induced proliferation of leukemic cells, and a TGF-beta induced protein was the most strongly upregulated transcript (>7 fold elevated) in PBMCs during the course of therapy.

### Example 4

### Pretreatment Expression Patterns Associated with Veno-Occlusive Disease

[0196] U133A-derived transcriptional profiles of the 36 AML PBMC samples were co-normalized using the scaled frequency normalization method. A total of 7405 transcripts were detected in one or more profiles with a maximal frequency greater than or equal to 10 ppm (denoted as 1P, 1≧10 ppm) across the profiles.

[0197] Veno-occlusive disease (VOD) is one of the most serious complications following hematopoietic stem cell transplantation and is associated with a very high mortality in its severe form. To identify transcripts with significant differences in expression at baseline between the four patients who eventually experienced VOD and the thirty-two non-VOD patients, average fold differences between VOD and non-VOD patient profiles were calculated by dividing the mean level of expression in the four baseline VOD profiles by the mean level of expression in the 32 baseline non-VOD profiles. A Student's t-test (two-sample, unequal variance) was used to assess the significance of the difference in expression between the groups.

[0198] Transcripts in baseline PBMCs significantly associated with the onset of VOD were identified by comparing mean levels of expression in PMBCs from the VOD baseline samples (n=4) with mean levels of expression in PBMCs from the non-VOD baseline samples (n=32). The numbers of transcripts exhibiting at least a 2-fold average difference between VOD and non-VOD baseline PBMCs with increasing levels of significance are presented in Table 16. A total of 161 transcripts possessed at least an average 2-fold difference between the baseline VOD and non-VOD samples, and significance in a paired Student's t-test of less than 0.05. Of the 161 transcripts, only 3 transcripts exhibited a mean elevated level of expression 2-fold or greater in VOD PBMCs at baseline. These and forty-seven other transcripts showing less than 2-fold but exhibiting the greatest fold elevation in VOD patients at baseline are presented in Table 5. The levels of p-selectin ligand, a potentially biologically relevant transcript that appeared to be significantly elevated in PBMCs of patients who eventually experienced VOD, are presented in FIG. 4.

TABLE 16
Numbers of two-fold changed genes between baseline samples
of VOD patients (n = 4) and non-VOD patients (n = 32)
meeting increasing levels of significance

| | No. of transcripts with average 2-fold change |
|---|---|
| Significance Level | between baseline (Day 0) and final visit (Day 36) |
| p < 0.05 | 161 |
| p < 0.01 | 98 |
| p < 1 × 10-3 | 42 |
| p < 1 × 10-4 | 10 |
| p < 1 × 10-5 | 4 |
| p < 1 × 10-6 | 2 |

[0199] The remaining 158 transcripts exhibited a mean reduced level of expression 2-fold or greater in VOD PBMCs at baseline, and the fifty genes with the greatest fold reduction in VOD patient PBMCs at baseline are presented in Table 6. Evaluation of this set of transcripts revealed a majority of leukemic blast-associated markers. This unanticipated finding by microarray analysis actually suggests that patients with lower peripheral blast counts may be more susceptible to VOD in the context of GO-based therapy.

### Example 5

### Pretreatment Transcriptional Patterns Associated with Clinical Response

[0200] As in the preceding Example, 7405 transcripts detected with a maximal frequency greater than or equal to 10 ppm in one or more profiles were selected for further evaluation.

[0201] To identify transcripts with significant differences in expression at baseline between the 8 patients who were non-responders (NR) and the 28 patients who were responders (R), average fold differences between NR and R patient profiles were calculated by dividing the mean level of expression in the eight baseline NR profiles by the mean level of expression in the 28 baseline R profiles. A Student's t-test (two-sample, unequal variance) was used to assess the significance of the difference in expression between the groups. The numbers of transcripts exhibiting at least a 2-fold average difference between R and NR baseline PBMCs with increasing levels of significance are presented in Table 17. A total of 113 transcripts possessed at least an average 2-fold difference between the baseline R and NR samples, and significance in a paired Student's t-test of less than 0.05. Of the 113 transcripts, 6 transcripts exhibited a mean elevated level of expression 2-fold or higher in non-responder PBMCs at baseline. These and forty-four other transcripts showing less than 2-fold but exhibiting the greatest fold elevation in responding patients at baseline are presented in Table 3. A total of 107 transcripts exhibited a mean reduced level of expression 2-fold or greater in non-responder PBMCs at baseline, and the fifty genes with the greatest fold reduction are presented in Table 4.

TABLE 17
Numbers of two-fold changed genes between baseline
samples of non-responding patients (n = 8) and responding
patients (n = 28) meeting increasing levels of significance

| | No. of transcripts with average 2-fold |
|---|---|
| | change between NR and R at |
| Significance Level | baseline |
| p < 0.05 | 113 |
| p < 0.01 | 45 |
| p < 1 × 10-3 | 7 |
| p < 1 × 10-4 | 1 |

[0202] Pretreatment levels of transcripts encoded by genes with potential roles in the metabolism or mechanism of action of GO were specifically interrogated as well. Levels of the MDR1 drug efflux transporter were low in all PBMC samples and were not significantly distinct between responders and non-responders at baseline (FIG. 5). The remaining members of the ABC transporter family contained on the Affymetrix U133A gene chip were also interrogated in the event that another ABC transporter might be differentially expressed, but none of the ABC transporters were significantly distinct between responder and non-responder PBMCs at baseline (FIG. 6). Levels of transcripts encoding the CD33 cell surface receptor were detected at generally higher levels in the AML PBMCs, but like MDR1, the CD33 transcript was also not significantly distinct between R and NR PBMCs at baseline (FIG. 7).

[0203] To identify a gene classifier capable of classifying responder and non-responders on the basis of baseline gene expression patterns, gene selection and supervised class prediction were performed using Genecluster version 2.0 previously described and available at (http://www.genome.wi.mit.edu/cancer/software/genecluster2.html). For nearest neighbor analysis, expression profiles for 36 baseline AML PMBCs from were co-normalized using the scale frequency method with 14 baseline AML PBMCs from an independent clinical trial of GO in combination with daunorubicin. All expression data were z-score normalized prior to analysis. A total of 11382 sequences were used in this analysis, based on inclusion of all transcripts with frequencies possessing at least one value of greater than or equal to 5 ppm across the baseline profiles. The 36 PBMC baseline profiles from were treated as a training set, and models containing increasing numbers of features (transcript sequences) were built using a one versus all approach with a S2N similarity metric that used median values for the class estimate. All comparisons were binary distinctions, and each model (with increasing numbers of features) was evaluated in the 36 PBMC profiles by 10-fold cross validation. The optimally predictive model arising from the 10-fold cross validation of the 36 PBMC profiles was then applied to the 14 co-normalized profiles from the other clinical trial to evaluate the gene classifiers accuracy in an independent set of clinical samples taken from AML patients prior to therapy.

[0204] A 10-gene classifier was found to yield the highest overall prediction accuracy (78%) by 10-fold cross validation on the peripheral blood AML profiles in the present study (FIG. 8 and Table 18). This gene classifier exhibited a sensitivity of 86%, a specificity of 50%, a positive predictive value of 86% and a negative predictive value of 50%. This classifier was also applied to the 14 untested profiles from the independent study in which GO plus daunorubicin composed the therapy regimen; the results are presented in FIG. 9. For those 14 profiles, the ten gene classifier demonstrated an overall prediction accuracy of 78%, a sensitivity of 100%, a specificity of 57%, a positive predictive value of 70% and a negative predictive value of 100%.

TABLE 18
Transcripts in the 10-gene classifier associated with elevated PBMC levels in
responders (top panel) or non-responders (bottom panel) prior to therapy.

| Top S2N | | | | | |
|---|---|---|---|---|---|
| Transcripts | | Affymetrix | | | |
| Elevated in: | Rank | ID | Name | Cyto Band | Unigene ID |
| R | 1 | 203739_at | zinc finger protein 217 | 20q13.2 | Hs.155040 |
| R | 2 | 219593_at | peptide transporter 3 | 11q13.1 | Hs.237856 |
| R | 3 | 204132_s_at | forkhead box O3A | 6q21 | Hs.14845 |
| R | 4 | 210972_x_at | T cell receptor alpha | 14q11.2 | Hs.74647 |
| | | | locus | | |
| R | 5 | 205220_at | putative chemokine | 12q24.31 | Hs.137555 |
| | | | receptor; GTP-binding | | |
| | | | protein | | |
| NR | 1 | 208581_x_at | metallothionein 1L, | 16q13 | Hs.278462 |
| | | | metallothionein 1X | | |
| NR | 2 | 208963_x_at | fatty acid desaturase 1 | 11q12.2-q13.1 | Hs.132898 |
| NR | 3 | 216336_x_at | uncharacterized | n/a | n/a |
| NR | 4 | 209407_s_at | deformed epidermal | 11p15.5 | Hs.6574 |
| | | | autoregulatory factor 1 | | |
| | | | (Drosophila) | | |
| NR | 5 | 203725_at | growth arrest and DNA- | 1p31.2-p31.1 | Hs.80409 |
| | | | damage-inducible, alpha | | |

[0205] Some pharmacogenomic co-diagnostics developed in the future will likely rely on qRT-PCR based assays that can utilize small (pair-wise or greater) combinations of genes that enable accurate classification. To identify a smaller classifier the Affymetrix-based expression levels of two genes (Table 19), metallothionein 1X/1L and serum glucocorticoid regulated kinase, which were overexpressed in AML PBMCs from non-responders and responders respectively, were plotted to determine whether a pair-wise combination of transcripts could enable classification (FIG. 10, panel A). The two gene classifier employing metallothionein 1X/1L and serum glucocorticoid regulated kinase was selected on the basis of their 1) significantly elevated or repressed fold differences between responder and non-responder categories, respectively; and 2) known annotation. The individual expression values (in terms of ppm) of each transcript in each baseline AML sample were plotted to identify cutoffs for expression that gave the highest sensitivity and specificity for class assignment. From the original 36 patients, six of the eight non-responders had serum glucocorticoid regulated kinase levels <30 ppm and metallothionein 1X/1L levels>30 ppm. Only 2 of the 28 responders possessed similar levels of gene expression. For these 36 sample, the 2-gene classifier therefore exhibited an apparent 88% overall accuracy, a sensitivity of 93%, a specificity of 75%, a positive predictive value of 93% and a negative predictive value of 75%.

### Table 19. Transcripts in the 2-Gene Classifier Associated with Elevated Levels in Responders (Serum/Gluclocorticoid Regulated Kinase) or Non-Responders (metallothionein 1L,1X) Prior to Therapy

TABLE 19
Transcripts in the 2-gene classifier associated with elevated levels
in responders (serum/gluclocorticoid regulated kinase) or non-
responders (metallothionein 1L, 1X) prior to therapy.

| | | Cyto | Unigene |
|---|---|---|---|
| Affymetrix ID | Name | Band | ID |
| 201739_at | serum/glucocorticoid | 6q23 | Hs•296323 |
| | regulated kinase | | |
| 208581_x_at | metallothionein 1L, | 16q13 | Hs•278462 |
| | metallothionein 1X | | |

[0207] This 2-gene classifier (serum glucocorticoid regulated kinase <30 ppm, metallothionein 1X,1L>30 ppm) was also applied to the 14 untested profiles from the independent clinical trial in which GO plus daunorubicin composed the therapy regimen (FIG. 10, panel B). In that study, the 2-gene classifier demonstrated identical overall performance as the 10-gene classifier, with an overall prediction accuracy of 78%, a sensitivity of 100%, a specificity of 57%, a positive predictive value of 70% and a negative predictive value of 100%.

[0208] Apparent performance characteristics of both the 10-gene and 2-gene classifiers for the first dataset of 36 samples and actual performance characteristics of both classifiers in the evaluation of the 14 independent samples are listed in Table 20.

TABLE 20
Performance characteristics of the 2-gene and 10-gene classifiers
by cross-validation and in a test set.

| | |
|---|---|
| 10 gene classifier | 2 gene classifier |

Cross-validation

| | | |
|---|---|---|
| Accuracy | 78% | 88% |
| Sensitivity | 86% | 93% |
| Specificity | 50% | 75% |
| Positive predictive value | 86% | 93% |
| Negative predictive value | 50% | 75% |

Test set

| | | |
|---|---|---|
| Accuracy | 78% | 78% |
| Sensitivity | 100% | 100% |
| Specificity | 57% | 57% |
| Positive predictive value | 70% | 70% |
| Negative predictive value | 100% | 100% |

[0209] In this analysis transcriptional profiling was applied to baseline peripheral blood samples to characterize transcriptional patterns that might provide insights into, or biomarkers for, AML patients' abilities to respond or fail to respond to a GO combination chemotherapy regimen. The largest percentage of patients in this study possessed a normal karyotype (33%), while other chromosomal abnormalities were relatively evenly distributed among the remaining patients. This heterogeneity of cytogenetic backgrounds allowed us to analyze the entire group of AML profiles without segregating them into karyotype-based groups, which in turn enabled us to search for transcriptional patterns that might be correlated with response to the GO combination regimen regardless of the molecular abnormalities involved in this complex disease. Despite the recent description of expression signatures associated with various chromosomal abnormalities in AML, it is clear that expression of many of the individual transcripts in the hallmark signatures are not unique to specific karyotypes. In addition, Bullinger et al. (2004) N. Engl. J. Med. 350:1605-16, importantly demonstrated in their recent study that relatively homogeneous transcriptional patterns correlated with overall survival were detectable in AML samples from patients despite their diverse cytogenetic backgrounds, and these prognostic profiles segregated samples from a test set of patients into good and poor outcome categories that possessed significant differences in overall survival.

[0210] An objective of the present study was not necessarily to identify generally prognostic profiles associated with overall survival, but rather to identify a transcriptional pattern in peripheral blood that, if validated, could allow identification of patients who would or would not benefit (i.e., achieve initial remission) from a GO combination chemotherapy regimen. Comparison of responder (i.e. remission) and non-responder profiles at baseline identified a number of transcripts significantly altered between the groups.

[0211] Transcripts present at higher levels in responding patients prior to therapy included T-cell receptor alpha locus, serum/glucocorticoid regulated kinase, aquaporin 9, forkhead box 03, IL8, TOSO (regulator of fas-induced apoptosis), IL1 receptor antagonist, p21/cip1, a specific subset of IFN-inducible transcripts, and other regulatory molecules. The list of transcripts elevated in responder peripheral blood appears to contain markers of both normal peripheral blood cells (lymphocytes, monocytes and neutrophils) and blast-specific transcripts alike. A higher percentage of pro-apoptotic related molecules were elevated in peripheral blood of patients who ultimately responded to therapy. FOX03 is a critical pro-apoptotic molecule that is inactivated during IL2-mediated T-cell survival and has recently been shown to be inactivated during FLT3-induced, PI3Kinase dependent stimulation of proliferation in myeloid cells. The finding that FOX03 is elevated in peripheral blood of AML patients that ultimately responded to GO combination therapy supports the theory that apoptotically “primed” cells will be more sensitive to the effects of GO based therapy regimens and possibly other chemotherapies as well. Levels of FOX01A are positively correlated with survival in AML patients receiving two different regimens.

[0212] A number of transcripts were also elevated in blood samples of AML patients who failed to respond to therapy. A comparison was made between transcripts associated with failure to respond to the current GO combination regimen and transcripts recently reported as predictive of poor outcome with respect to overall survival. Elevation in homeobox B6 levels in peripheral blood samples of non-responders in this study was consistent with the overexpression of multiple homeobox genes in patients with poor outcomes related to survival. Homeobox B6 is elevated during normal granulocytopoiesis and monocytopoiesis, but is normally turned off following cell maturation. Homeobox B6 was found to be dysregulated in a substantial percentage of AML samples and has been proposed to play a role in leukemogenesis.

[0213] The present analyses also identified several families of transcripts where overexpression appears to be correlated with failure to respond to the GO combination regimen and do not appear to be correlated with overall survival. Several metallothionein isoforms were elevated in peripheral blood samples of patients who failed to respond to the GO combination regimen. Based on the mechanism of action of GO, elevated antioxidant defenses would be expected to adversely impact the efficacy of the chalechiamicin-directed cytotoxic conjugate. These findings however contrast with those reported by Goasguen et al. (1996) Leuk. Lymphoma. 23(5-6):567-76, who identified metallothionein overexpression as strongly associated with complete remission in the context of the absence or presence of other drug-resistance phenotypes in patients with leukemias. Metallothionein isoform overexpression has recently been characterized as a hallmark of the t(15;17) chromosomal translocation in AML but none of the patients in the present study were characterized as possessing this cytogenetic abnormality. However, in that study metallothionein isoform overexpression was not specific to the t(15;17) translocation, occurring in several other karyotypes as well.

[0214] The foregoing description of the present invention provides illustration and description, but is not intended to be exhaustive or to limit the invention to the precise one disclosed. Modifications and variations are possible consistent with the above teachings or may be acquired from practice of the invention. Thus, it is noted that the scope of the invention is defined by the claims and their equivalents.

We claim:

1. A method for predicting a clinical outcome in response to a treatment of a leukemia, the method comprising the steps of:
(1) measuring expression levels of one or more prognostic genes of the leukemia in a peripheral blood mononuclear cell sample derived from a patient prior to the treatment; and
(2) comparing each of the expression levels to a corresponding control level,
wherein the result of the comparison is predictive of a clinical outcome.

2. The method of claim 1, wherein the one or more prognostic genes comprise at least a first gene selected from a first class and a second gene selected from a second class, wherein the first class comprises genes having higher expression levels in peripheral blood mononuclear cells in patients predicted to have a less desirable clinical outcome in response to the treatment and the second class comprises genes having higher expression levels in peripheral blood mononuclear cells in patients predicted to have a more desirable clinical outcome in response to the treatment.

3. The method of claim 2, wherein the first gene is selected from Table 3 and the second gene is selected from Table 4.

4. The method of claim 2, wherein the first gene is selected from the group consisting of zinc finger protein 217, peptide transporter 3, forkhead box O3A, T cell receptor alpha locus and putative chemokine receptor/GTP-binding protein, and the second gene is selected from the group consisting of metallothionein, fatty acid desaturase 1, uncharacterized gene corresponding to Affymetrix ID 216336, deformed epidermal autoregulatory factor 1 and growth arrest and DNA-damage-inducible alpha.

5. The method of claim 2, wherein the first gene is serum glucocorticoid regulated kinase and the second gene is metallothionein 1X/1L.

6. The method of claim 1, wherein the clinical outcome is development of an adverse event.

7. The method of claim 6, wherein the adverse event is veno-occlusive disease.

8. The method of claim 7, wherein the one or more prognostic genes comprise one or more genes selected from Table 5 or Table 6.

9. The method of claim 8, wherein the one or more prognostic genes comprise p-selectin ligand.

10. The method of any one of the preceding claims, wherein the treatment comprises a gemtuzumab ozogamicin (GO) combination therapy.

11. The method of any one of the preceding claims, wherein the corresponding control level is a numerical threshold.

12. A method for predicting a clinical outcome of a leukemia, the method comprising the steps of:
(1) generating a gene expression profile from a peripheral blood sample of a patient having the leukemia; and
(2) comparing the gene expression profile to one or more reference expression profiles,
wherein the gene expression profile and the one or more reference expression profiles comprise expression patterns of one or more prognostic genes of the leukemia in peripheral blood mononuclear cells, and wherein the difference or similarity between the gene expression profile and the one or more reference expression profiles is indicative of the clinical outcome for the patient.

13. The method of claim 12, wherein the leukemia is acute leukemia, chronic leukemia, lymphocytic leukemia or nonlymphocytic leukemia.

14. The method of claim 13, wherein the leukemia is acute myeloid leukemia (AML).

15. The method of any one of claims 12-14, wherein the clinical outcome is measured by a response to an anti-cancer therapy.

16. The method of claim 15, wherein the anti-cancer therapy comprises administering one or more compounds selected from the group consisting of an anti-CD33 antibody, a daunorubicin, a cytarabine, a gemtuzumab ozogamicin, an anthracycline, and a pyrimidine or purine nucleotide analog.

17. The method of any one of claims 12-16, wherein the one or more prognostic genes comprise one or more genes selected from Table 3 or Table 4.

18. The method of claim 17, wherein the one or more prognostic genes comprise ten or more genes selected from Table 3 or Table 4.

19. The method of claim 18, wherein the one or more prognostic genes comprise twenty or more genes selected from Table 3 or Table 4.

20. The method of any one of claims 12-19, wherein step (2) comprises comparing the gene expression profile to the one or more reference expression profiles by a k-nearest neighbor analysis or a weighted voting algorithm.

21. The method of any one of claims 12-19, wherein the one or more reference expression profiles represent known or determinable clinical outcomes.

22. The method of any one of claims 12-19, wherein step (2) comprises comparing the gene expression profile to at least two reference expression profiles, each of which represents a different clinical outcome.

23. The method of claim 22, wherein each reference expression profile represents a different clinical outcome selected from the group consisting of remission to less than 5% blasts in response to the anti-cancer therapy; remission to no less than 5% blasts in response to the anti-cancer therapy; and non-remission in response to the anti-cancer therapy.

24. The method of any one of claims 12-19, wherein the one or more reference expression profiles comprise a reference expression profile representing a leukemia-free human.

25. The method of any one claims 12-19, wherein step (1) comprises generating the gene expression profile using a nucleic acid array.

26. The method of claim 15, wherein step (1) comprises generating the gene expression profile from the peripheral blood sample of the patient prior to the anti-cancer therapy.

27. A method for selecting a treatment for a leukemia patient, the method comprising the steps of:
(1) generating a gene expression profile from a peripheral blood sample derived from the leukemia patient;
(2) comparing the gene expression profile to a plurality of reference expression profiles, each representing a clinical outcome in response to one of a plurality of treatments; and
(3) selecting from the plurality of treatments a treatment which has a favorable clinical outcome for the leukemia patient based on the comparison in step (2),
wherein the gene expression profile and the one or more reference expression profiles comprise expression patterns of one or more prognostic genes of the leukemia in peripheral blood mononuclear cells.

28. The method of claim 27, wherein the one or more prognostic genes comprise one or more genes selected from Table 3 or Table 4.

29. The method of claim 28, wherein the one or more prognostic genes comprise ten or more genes selected from Table 3 or Table 4.

30. The method of claim 29, wherein the one or more prognostic genes comprise twenty or more genes selected from Table 3 or Table 4.

31. The method of any one of claims 27-30, wherein step (2) comprises comparing the gene expression profile to the plurality of reference expression profiles by a k-nearest neighbor analysis or a weighted voting algorithm.

32. A method for diagnosis, or monitoring the occurrence, development, progression or treatment, of a leukemia, the method comprising the steps of:
(1) generating a gene expression profile from a peripheral blood sample of a patient having the leukemia; and
(2) comparing the gene expression profile to one or more reference expression profiles,
wherein the gene expression profile and the one or more reference expression profiles comprise the expression patterns of one or more diagnostic genes of the leukemia in peripheral blood mononuclear cells, and wherein the difference or similarity between the gene expression profile and the one or more reference expression profiles is indicative of the presence, absence, occurrence, development, progression, or effectiveness of treatment of the leukemia in the patient.

33. The method of claim 32, wherein the leukemia is AML.

34. The method of claim 33, wherein the one or more diagnostic genes comprise one or more genes selected from Table 7.

35. The method of claim 33, wherein the one or more diagnostic genes comprise one or more genes selected from Table 8 or Table 9.

36. The method of claim 33, wherein the one or more diagnostic genes comprise ten or more genes selected from Table 7.

37. The method of claim 33, wherein the one or more diagnostic genes comprise ten or more genes selected from Table 8 or Table 9.

38. The method of claim 32, wherein the one or more reference expression profiles comprise a reference expression profile representing a disease-free human.

39. An array for use in a method for predicting a clinical outcome for an AML patient comprising a substrate having a plurality of addresses, each address comprising a distinct probe disposed thereon, wherein at least 15% of the plurality of addresses have disposed thereon probes that can specifically detect prognostic genes of AML in peripheral blood mononuclear cells.

40. The array of claim 39, wherein at least 30% of the plurality of addresses have disposed thereon probes that can specifically detect prognostic genes of AML in peripheral blood mononuclear cells.

41. The array of claim 39, wherein at least 50% of the plurality of addresses have disposed thereon probes that can specifically detect prognostic genes of AML in peripheral blood mononuclear cells.

42. The array of any one of claims 39-41, wherein the prognostic genes are selected from Tables 3, 4, 5 or 6.

43. The array of any one of claims 39-41, wherein the probe is a nucleic acid probe.

44. The array of any one of claims 39-41, wherein the probe is an antibody probe.

45. An array for use in a method for diagnosis of AML comprising a substrate having a plurality of addresses, each address comprising a distinct probe disposed thereon, wherein at least 15% of the plurality of addresses have disposed thereon probes that can specifically detect diagnostic genes of AML in peripheral blood mononuclear cells.

46. The array of claim 45, wherein at least 30% of the plurality of addresses have disposed thereon probes that can specifically detect diagnostic genes of AML in peripheral blood mononuclear cells.

47. The array of claim 45, wherein at least 50% of the plurality of addresses have disposed thereon probes that can specifically detect diagnostic genes of AML in peripheral blood mononuclear cells.

48. The array of any one of claims 45-47, wherein the diagnostic genes are selected from Table 7.

49. The array of any one of claims 45-47, wherein the probe is a nucleic acid probe.

50. The array of any one of claims 45-47, wherein the probe is an antibody probe.

51. A computer-readable medium comprising a digitally-encoded expression profile comprising a plurality of digitally-encoded expression signals, wherein each of the plurality of digitally-encoded expression signals comprises a value representing the expression of a prognostic gene of AML in a peripheral blood mononuclear cell.

52. The computer-readable medium of claim 51, wherein the prognostic gene is selected from Tables 3, 4, 5 or 6.

53. The computer-readable medium of claim 51, wherein the value represents the expression of the prognostic gene of AML in a peripheral blood mononuclear cell of a patient with a known or determinable clinical outcome.

54. The computer-readable medium of claim 51, wherein the digitally-encoded expression profile comprises at least ten digitally-encoded expression signals.

55. A computer-readable medium comprising a digitally-encoded expression profile comprising a plurality of digitally-encoded expression signals, wherein each of the plurality of digitally-encoded expression signals comprises a value representing the expression of a diagnostic gene of AML in a peripheral blood mononuclear cell.

56. The computer-readable medium of claim 55, wherein the diagnostic gene is selected from Table 7.

57. The computer-readable medium of claim 55, wherein the value represents the expression of the diagnostic gene of AML in a peripheral blood mononuclear cell of an AML-free human.

58. The computer-readable medium of claim 55, wherein the digitally-encoded expression profile comprises at least ten digitally-encoded expression signals.

59. A kit for prognosis of AML, the kit comprising: a) one or more probes that can specifically detect prognostic genes of AML in peripheral blood mononuclear cells; and b) one or more controls, each representing a reference expression level of a prognostic gene detectable by the one or more probes.

60. The kit of claim 59, wherein the prognostic genes are selected from Tables 3, 4, 5 or 6.

61. A kit for diagnosis of AML, the kit comprising: a) one or more probes that can specifically detect diagnostic genes of AML in peripheral blood mononuclear cells; and b) one or more controls, each representing a reference expression level of a prognostic gene detectable by the one or more probes.

62. The kit of claim 61, wherein the diagnostic genes are selected from Table 7.

The application's sequence listing, which the Patent Office published only in electronic form, follows.

SEQUENCE LISTING (826 sequences)

SEQ ID NO: 1 - DNA, 233 bp, Homo sapiens
  misc_feature (1)..(233): 208581_x_at
gcgtgttttcctcttgatcgggaactcctgcttctccttgcctcgaaatggaccccaactgctcctgctcgcctgttggctcctgtgcctgtgccggctcctgcaaatgcaaagagtgcaaatgcacctcctgcaagaagagctgctgctcctgctgccctgtcggctgtgccaagtgtgcccagggctgcatctgcaaagggacgtcagacaagtgcagctgctgtgcctga

SEQ ID NO: 2 - DNA, 523 bp, Homo sapiens
  misc_feature (1)..(523): 208963_x_at
  misc_feature (497)..(497): n is a, c, g, or t
ggtggcaggattactactttgcctcttcagcagcatctactctaggcatattgatcattttagacactgggagaagagaacctcaaactaggaggaaaagacagagcctccacttagttttgggaggggatggcagacagtcaaggagatgagcgtcctaaggcatgttgggatagggtcagatgcaccacccatggagaggtttgtcaacacaaagacatggaaggttagaggtttgtcaacaaaaagacatggaaggttaggtttgtcaacacaaagacatggaagattagaggtttgtcaacacaaagacacaggaagaatgggctgcagaagatttagatgttttccatttgggcacattttacttagctggagaactaggtttaaaacagcctgggtaggaaaattagaagcaagctggatgcagtggctcatgcctgtaatcccaacacttttgggaggtccaggcaggaggatcacttgggcccaggagntcaagcctgcagcgagctgagatcac

SEQ ID NO: 3 - DNA, 339 bp, Homo sapiens
  misc_feature (1)..(339): 216336_x_at
ccaactgcctgactgcttgttggcctcaccggtgggagctccagcatctcctttgctcgaaatggaccccaactgctcctgtgccactggtggctcctgcatgtgcgccggctcctgcaagtgcaaagagtgcaaatgcacctcctgcaagaagagctgctgctcctgctgccccgtgggctgtgccaagtgtgcccagggctgcatctgcaaaggggcgttggagaagtgcaactgctatgcctgacgtggggacagctctgctcccagatgtaaatagagtaacctgcacaaacctggattttttaaaaaatacaacactgagccatttgcttcatt

SEQ ID NO: 4 - DNA, 500 bp, Homo sapiens
  misc_feature (1)..(500): 209407_s_at
atcgcaccgtttccagaagctgcgttgccaacgtcacatcccaaaatagtgttgacatccctgcctgcgctggcggtcccacccccgactcccaccaaagcggcacctcccgcgtaggtcaatgggctggagctgtcagagccgcggagctggctgtacctagaagagatggtcaactccttgctcaacacagcgcagcagctgaagacgctgtttgagcaagccaagcatgccagcacctaccgagaagctgccacaaaccaggccaagatccacgctgacgcagagcggaaggagcagtcctgcgttaactgcggccgggaggctatgagcgagtgcaccggttgccacaaggtcaactactgctccaacttctgccaacgcaaggactggaaggatcaccagcacatatgcggccagtcagcagctgtcaccgtccaggcagacgaagtccacgtggctgaaagcgtgatggagaaggtgaccgtgtgaggctccat

SEQ ID NO: 5 - DNA, 407 bp, Homo sapiens
  misc_feature (1)..(407): 203725_at
gggttccagtgattaatctccctgaacggtgatggcatctgaatgaaaataactgaaccaaattgcactgaagtttttgaaatacctttgtagttactcaagcagttactccctacactgatgcaaggattacagaaactgatgccaaggggctgagtgagttcaactacatgttctgggggcccggagatagatgactttgcagatggaaagaggtgaaaatgaagaaggaagctgtgttgaaacagaaaaataagtcaaaaggaacaaaaattacaaagaaccatgcaggaaggaaaactatgtattaatttagaatggttgagttacattaaaataaaccaaatatgttaaagtttaagtgtgcagccatagtttgggtatttttggtttatatgccctcaagt

SEQ ID NO: 6 - DNA, 328 bp, Homo sapiens
  misc_feature (1)..(328): 205366_s_at
cctcagcctgatcaggcttcctggtgagaactgaggagcggactcacttgatgtttcctggaagcagagcaaaagttctcttgtccctgtcgcgtctcattttgtccatgtcccccgtgcacggttcaatggtagattcgctgtcctcagcgggggccttgaagactccctgatcccagacctggtcgtctctcccaccccctccccaaagccactggaaggagcacatactacctagaagtaagaagaggagcctcagaagaaaacaaagttctattttattaattttctatgtgttgtgtttgtagtcttgtcttagctctggacg

SEQ ID NO: 7 - DNA, 342 bp, Homo sapiens
  misc_feature (1)..(342): 209480_at
aaaaaaggaaatcgctgcagaatgaaggaatatcccttgaggtgacccagccaacctgtggccagaaggagggttgtaccttgaaaagaccactgaaagcattttggggtgtcaagtaagggtgggcagaggaggtagaaaatcaattcaattgtcgcatcattcatggttctttaatattgatgctcagtgcattggccttagaatatcccagcctctcttctggtttggtgagtgctgtgtaagtaagcatggtagaattgtttggagacatatatagtgatccttggtcactggtgtttcaaacattctggaaagtcacatcgatcaagaatatttttt

SEQ ID NO: 8 - DNA, 507 bp, Homo sapiens
  misc_feature (1)..(507): 204430_s_at
gacttctagctgtctgtgaatatccagaaataaaacaactctgatgtggaatgcagtcctcatctccagcctccccaccccagtgggaactgtgcaaagggctgccttgctgttcttgaagctgggctgtctctctccatgttggcctgtcaccagacccgagtcaattaaacagctggtcctccactttgctggttcagccttcgtgtggctcctggtaacgtggctccaccttgatgggtcaacctttgtgtggctcctggtaacataacaacaacagttactatagtggtgagatggaaggaatcaaattttgccagagaaactaactcggtggccccaacaggtcttccggggccatgggcatttgtttagagccaaattcatcctcttaccagatccttttccagaaatacctgtctaggaaggtgtgatgtcagaaacaatgacatccagaaagctgaggaacaggttcctgtggagacactgagtcagaattcttcatcc

SEQ ID NO: 9 - DNA, 395 bp, Homo sapiens
  misc_feature (1)..(395): 204468_s_at
ggagcagcctcgaaactgtgacgatgaagtgtacgagctgatgcgtcagtgctggcgggaccgtccctatgagcgacccccctttgcccagattgcgctacagctaggccgcatgctggaagccaggaaggcctatgtgaacatgtcgctgtttgagaacttcacttacgcgggcattgatgccacagctgaggaggcctgagctgccatccagccagaacgtggctctgctggccggagcaaactctgctgtctaacctgtgaccagtctgacccttacagcctctgacttaagctgcctcaaggaatttttttaacttaagggagaaaaaaagggatctggggatggggtgggcttaggggaactgggttcccatgctttgtaggtgtctcat

SEQ ID NO: 10 - DNA, 431 bp, Homo sapiens
  misc_feature (1)..(431): 212747_at
accagctgctcagcgcataagaccttcccgacaggctctgcgtgtgcagctctctgcgtccctcctgggccctccagcgtcagacactaatgggagttcccgagatgctcgggtttgagcagggagcaggcagagctgcagtcagagacattagaaaaccagtctgaattgggtctgtctttgagatgcccaggccagcagaaagcagctcagaagtattgttgctcatggtgtggcaatggactgaactgtaatgaaaatgttatttaatctttgtctctgtattttgatacttgaatgactttcccttttgttttactgtatataaaattgttaatctgtctgattttgtctgaattataaacactttgaggtaccaaacataaccaatctgtgcaacaacatagactgacctcagtacccaagagagt

SEQ ID NO: 11 - DNA, 457 bp, Homo sapiens
  misc_feature (1)..(457): 205227_at
caaatgctgttgggcacccctagaaataccttgatgttttttctatttatatgcctgcctttggtacttaattttacaaatgctgtaatataaagcatatcaagtttatgtgatacgtatcattgcaagagaatttgtttcaagatttttttttaatgttccagaagatggccaatagagaacattcaagggaaatggggaaacataatttagagaacaagaacaaaccatgtctcaaatttttttaaaaaaaattaatggttttaaatatatgctatagggacgttccatgcccaggttaacaaagaactgtgatatatagagtgtctaattacaaaatcatatacgatttatttaattctcttctgtattgtaacttagatgattcccaaggactctaataaaaaatcacttcattgtatttggaaacaaaaacatcattcattaattacttatt

SEQ ID NO: 12 - DNA, 202 bp, Homo sapiens
  misc_feature (1)..(202): 201539_s_at
tgaagtgcaacaaggccatcacatctggaggaatcacttaccaggatcagccctggcatgccgattgctttgtgtgtgttacctgctctaagaagctggctgggcagcgtttcaccgctgtggaggaccagtattactgcgtggattgctacaagaactttgtggccaagaagtgtgctggatgcaagaaccccatcactgg

SEQ ID NO: 13 - DNA, 553 bp, Homo sapiens
  misc_feature (1)..(553): 203373_at
atcagagtctcttgggcattttatattttgcattctgatgtacctaggagttttgttaaacagatgatgtatgtgagtatttatcccattttatgcaattaaccaaatcaaccaaaaaaagtgaccatgaagtcctgtatttgtctttttactacatgtaggaactctcatgtgaatgagtactgtagtaatccattctatgggagccttatttcagaaatatttcaaactggtgcaaatggaaaagactttctcttttcctttaaagctaaagacaagaatatcatgctatacaggtgcaactcaatccccgttaataaaaaccaatgtaggtataggcattctaccctttcaaatagctgtgtcccaacctgttgccattgattttttggaaatggctttagaaatatccaagttgtccttgaattgtctaaccatggacataaacagttgtctcccttctactgtgtagaatactttgacttaattttcttccagatacagggggatacctgcctgtttttcaaagtgtttatttactgctgttactatt

SEQ ID NO: 14 - DNA, 327 bp, Homo sapiens
  misc_feature (1)..(327): 210093_s_at
tgacgacagtgaaattaccaaagaggatgatgcattgtggcctcctcctgaccgagtgggccggcaggagcttgaaatcgtcattggagatgaacacatttcttttacaacatcaaaaattggttcccttattgatgtcaatcaatccaaggatccagaaggcttacgagtattttattatcttgtccaggacctgaagtgtttggtcttcagtcttattggattacacttcaagattaaaccaatctagactgaatattggtgtggacatggggggtgggtgggagtagaaaattttgtgtatatcagggcagtatttttttatga

SEQ ID NO: 15 - DNA, 256 bp, Homo sapiens
  misc_feature (1)..(256): 209392_at
aatcctgtaccaaatctgacatattatgcctgaatgactccactgtttttctctaatgcttgatttaggtagccttgtgttctgagtagagcttgtaataaatactgcagcttgagaaaaagtggaagcttctaaatggtgctgcagatttgatatttgcattgaggaaatattaattttccaatgcacagttgccacatttagtcctgtactgtatggaaacactgattttgtaaagttgcctttatttgctgtt

SEQ ID NO: 16 - DNA, 319 bp, Homo sapiens
  misc_feature (1)..(319): 203372_s_at
gagatagctcgcattcagactacctactaacaatatctgttaaaacatcagctggaccaactaatcttcgaatcgaataccaagacggaaaattcagattggactctatcatatgtgtcaaatccaagcttaaacaatttgacagtgtggttcatctgatcgactactatgttcagatgtgcaaggataagcggacaggtccagaagccccccggaacggcactgttcacctttatctgaccaaaccgctctacacgtcagcaccatctctgcagcatctctgtaggctcaccattaacaaatgtaccggtgccatctg

SEQ ID NO: 17 - DNA, 378 bp, Homo sapiens
  misc_feature (1)..(378): 212813_at
ggatgcttagcatgcaagttccctccatcattgccaccttggtagagagggatggctccccaccctcagcgttggggattcacgctccagcctccttcttggttgtcatagtgatagggtagccttattgccccctcttcttataccctaaaaccttctacactagtgccatgggaaccaggtctgaaaaagtagagagaagtgaaagtagagtctgggaagtagctgcctataactgagactagacggaaaaggaatactcgtgtattttaagatatgaatgtgactcaagactcgaggccgatacgaggctgtgattctgcctttggatggatgttgctgtacacagatgctacagacttgtactaacacaccgta

SEQ ID NO: 18 - DNA, 344 bp, Homo sapiens
  misc_feature (1)..(344): 204326_x_at
  misc_feature (173)..(173): n is a, c, g, or t
gcgtgttttcctcttgatcgggaactcctgcttctccttgcctcgaaatggaccccaactgctcctgctcgcctgttggctcctgtgcctgtgccggctcctgcaaatgcaaagagtgcaaatgcacctcctgcaagaagagctgctgctcctgctgccctgtgggctgtgcnaagtgtgcccagggctgcatctgcaaagggacgtcagacaagtgcagctgctgtgcctgatgccaggacagctgtgctctcagatgtaaatagagcaacctatataaacctggatttttttttttttttttttgtacaaccctgacccgtttgctacatctttttttctat

SEQ ID NO: 19 - DNA, 462 bp, Homo sapiens
  misc_feature (1)..(462): 203177_x_at
gattgctggttttagttgcaactttgtataaaagggactgagaaatttataaacttttttcttactgtcttttttctaaagtaaaaacaaagaaattatgtgccagatttatgcatattattttatgttgcatagaataaaatttttaatctttaattttacatttcctaaatatattttaagacgaaacatttgttctatagcttttccctttttttaagtaaggaattttatttttttctgaattattttctctcgtgagtatattgatccagaaagaaaacttgtattatgtgtgttttaaaatgagaaatctaaaaaacgaaaagtctccaaagtctctggaatttgaaacactttgcataacgtataaaagcctgtttaagagacagccaactatggcctgtggatcaaatccagcctgctgcctgctttttatggcctgtgagctaggaattgtgt

SEQ ID NO: 20 - DNA, 501 bp, Homo sapiens
  misc_feature (1)..(501): 212173_at
  misc_feature (101)..(101): n is a, c, g, or t
tacttgcgtagctctgcacacaggaagggctgctctgaataagagctcttttccatggacactcagcgctgccggaactgattttgaagaagtcactgccnggctctgagggcctagggtatgtgtcttaggatctcctgtgtgcacaaagtgtcactgacagaacacagcaggatggagagcagcctcctcagaagcctcacaagtctttcctcagatgaagacagagcaacgagtcagaagacagatttcaacagcgacttcaccatgcgaccttggacaagttatctcacctcatcagtagaataggaatgatccctacccctcaaaggtgctgatgacactagtgaccaagatactcatgtgggttggactgcccaggacacagcagatgcttagtaaacacagatggaattcagagggaaaatgtaggcattgaagaaagttgtcttactgaccatccggaaccaggctaaggatcccctagaaatcatagacctc

SEQ ID NO: 21 - DNA, 454 bp, Homo sapiens
  misc_feature (1)..(454): 204438_at
taattgcttgttttctagcctggcaagatattttcataaaagagggataacaatgctgattactaccttttaaaatattttagataaatgcacagcaccacagcaccacatctaagcattagtgatgggtagctgatgtcagcttcatgtggattttaagcactctagaaacaatgaagcttcttggcatattttaaggagctcccaaaatgtgttacctattaaattgtaactcagcaagtagaagaccatttgaaaagtcaggtacaaatttcctcaagtggcataaaaatgtagtcagttttctcttttaccagtttttatttccactccaattatttagaactttatttgtacatgtgcagaagaataaggcagctgagaatcttgtttcccccaagagagttttacaggctgagtgttgcaaatgtgttctttgtcctgttatatgtat

SEQ ID NO: 22 - DNA, 199 bp, Homo sapiens
  misc_feature (1)..(199): 212185_x_at
cgccggctcctgcaaatgcaaagagtgcaaatgcacctcctgcaagaaaagctgctgctcctgctgccctgtgggctgtgccaagtgtgcccagggctgcatctgcaaaggggcgtcggacaagtgcagctgctgcgcctgatgctgggacagccccgctcccagatgtaaagaacgcgacttccacaaacctggattt

SEQ ID NO: 23 - DNA, 270 bp, Homo sapiens
  misc_feature (1)..(270): 214281_s_at
tggaaattcctttagtgtcagttttttggaagccaatgatgtttgccactgatacattcatagaagtgtattatattttcatgaagctttgctttaagtgacactacgcgtgcagttcatttctagttcttgatagaactgcacttaattttcagtagtagtcttgactttttaagggctgtgttatattaagttctcccttactgttaaaacctaattaaatatgctttagaattttctaagacagtcctctggatcctctaaatgtga

SEQ ID NO: 24 - DNA, 450 bp, Homo sapiens
  misc_feature (1)..(450): 217975_at
gtgatgcgttggaaggttaatcgaaaccatccttacccctatttaatgtagtttaccttgatttttatctgatattaacaataccatatagcttgctttttattagcatttcctgatattcctttgtccatatttctacttataacctgttgctattaatggttttagatgtatctcttgttatctgcatctcattgtttattgtattttgaaccaatctacaagtctctgtcttttaataaaagaactttacacatttgtaaaaaagaggttcttggtaagatataaaatggaaaaaggctaagtaatatgtgaatatcatatttttgaaaggtaaaaagtacatttgtatattacatatatggacataacttgtgaaggatgaaagaaagtcagcctctcggtggtgggattatgaatgatttttctccttttgcttgttagtatttt

SEQ ID NO: 25 - DNA, 501 bp, Homo sapiens
  misc_feature (1)..(501): 220974_x_at
acaggtgtgtgctaccacatcttgctagttttgtatttttagcagagatgggggtttcaccatgttggccaggctagtctcgaactcctgacctcaggtgatccacctgccttggcctcccaaagcactgggattacaagcatgagccactgtgcccagcctgttccactgacatttcttagacattcagcaaaacccccaccttaacctcttttctttcttgagggttggtcctgtccccacctccaccctcccaccccctggaagaggaagggcccgggcatcagtggctagtccaaataaaatatgggcttggggatggaatgggtggtggtaagttcacagagtgtagttagatcccaactcccatgacctctggcttcagtggtgggtggggcagggcagatgaaagggcttcagtgggaacctctgagagcattttcctgttccccctatcaaccgcccccagtgataacatctgtgaagccagccattactcaa

SEQ ID NO: 26 - DNA, 342 bp, Homo sapiens
  misc_feature (1)..(342): 218807_at
  misc_feature (163)..(163): n is a, c, g, or t
tgccgtcagccgaactttgttatggagggagcagcctcacacaagcagaaacactcctgtggatggtattgtagcatgtattgtttattttagtcaatagaccctctccttataaatggtgtttagtcttcctgttgcatttcatgggcctgggggtttcctngcagaggatattggagcccctttttgtgacattaccaattacatctttgtccacgtttaatactttgttttggaaaatttaaatgctgcagatttgtgtagagttctaataccaaagacagaagtaaatgttttccatatactttgtcttgcctgtatgcagcccttgtgtaatatggt

SEQ ID NO: 27 - DNA, 371 bp, Homo sapiens
  misc_feature (1)..(371): 201263_at
gatctggatccaggctgtacattgaataaaaagattcgaaatgcacagttagcacagtataacttcattttagttgttggtgaaaaagagaaaatcactggcactgttaatatccgcacaagagacaataaggtccacggggaacgcaccatttctgaaactatcgagcggctacagcagctcaaagagttccgcagcaaacaggcagaagaagaattttaatgaaaaaattacccagattggctccatggaaaaggaggaacagcgtttccgtaaaattgactttgtactcgaaaacgtcaatttatattgaacttggaggaggagtttggcaaagtctgaaataggtcaacctgcaggcgtaactattt

SEQ ID NO: 28 - DNA, 113 bp, Homo sapiens
  misc_feature (1)..(113): 217165_x_at
gcgctggttcctgcaagtgcaaagagtgcaaatgcacctcctgcaagaagagctgctgctcctgctgccccgtgggctgtagcaagtgtgcccagggctgtgtttgcaaaggg

SEQ ID NO: 29 - DNA, 483 bp, Homo sapiens
  misc_feature (1)..(483): 201013_s_at
  misc_feature (61)..(61): n is a, c, g, or t
  misc_feature (78)..(78): n is a, c, g, or t
  misc_feature (80)..(80): n is a, c, g, or t
  misc_feature (82)..(82): n is a, c, g, or t
  misc_feature (85)..(85): n is a, c, g, or t
  misc_feature (88)..(88): n is a, c, g, or t
  misc_feature (89)..(89): n is a, c, g, or t
  misc_feature (91)..(91): n is a, c, g, or t
  misc_feature (92)..(92): n is a, c, g, or t
  misc_feature (93)..(93): n is a, c, g, or t
  misc_feature (94)..(94): n is a, c, g, or t
  misc_feature (95)..(95): n is a, c, g, or t
  misc_feature (96)..(96): n is a, c, g, or t
  misc_feature (97)..(97): n is a, c, g, or t
  misc_feature (98)..(98): n is a, c, g, or t
  misc_feature (99)..(99): n is a, c, g, or t
  misc_feature (100)..(100): n is a, c, g, or t
  misc_feature (101)..(101): n is a, c, g, or t
  misc_feature (102)..(102): n is a, c, g, or t
  misc_feature (103)..(103): n is a, c, g, or t
  misc_feature (104)..(104): n is a, c, g, or t
  misc_feature (105)..(105): n is a, c, g, or t
  misc_feature (106)..(106): n is a, c, g, or t
  misc_feature (107)..(107): n is a, c, g, or t
  misc_feature (108)..(108): n is a, c, g, or t
  misc_feature (109)..(109): n is a, c, g, or t
  misc_feature (110)..(110): n is a, c, g, or t
  misc_feature (111)..(111): n is a, c, g, or t
  misc_feature (112)..(112): n is a, c, g, or t
  misc_feature (113)..(113): n is a, c, g, or t
  misc_feature (114)..(114): n is a, c, g, or t
  misc_feature (115)..(115): n is a, c, g, or t
  misc_feature (116)..(116): n is a, c, g, or t
  misc_feature (117)..(117): n is a, c, g, or t
  misc_feature (118)..(118): n is a, c, g, or t
  misc_feature (119)..(119): n is a, c, g, or t
  misc_feature (120)..(120): n is a, c, g, or t
  misc_feature (121)..(121): n is a, c, g, or t
  misc_feature (122)..(122): n is a, c, g, or t
  misc_feature (123)..(123): n is a, c, g, or t
  misc_feature (124)..(124): n is a, c, g, or t
  misc_feature (125)..(125): n is a, c, g, or t
  misc_feature (126)..(126): n is a, c, g, or t
  misc_feature (127)..(127): n is a, c, g, or t
  misc_feature (128)..(128): n is a, c, g, or t
  misc_feature (129)..(129): n is a, c, g, or t
  misc_feature (130)..(130): n is a, c, g, or t
  misc_feature (131)..(131): n is a, c, g, or t
  misc_feature (132)..(132): n is a, c, g, or t
  misc_feature (133)..(133): n is a, c, g, or t
  misc_feature (134)..(134): n is a, c, g, or t
  misc_feature (135)..(135): n is a, c, g, or t
  misc_feature (136)..(136): n is a, c, g, or t
  misc_feature (137)..(137): n is a, c, g, or t
  misc_feature (138)..(138): n is a, c, g, or t
  misc_feature (140)..(140): n is a, c, g, or t
  misc_feature (158)..(158): n is a, c, g, or t
  misc_feature (159)..(159): n is a, c, g, or t
  misc_feature (448)..(448): n is a, c, g, or t
aactggcattactgactcccagctatatttctccagacttgcatttttttttttttttttngagacagggtctcactngncnccnacnncnnnnnnnnnnnnnnnnnnnnnnnnnnnnnnnnnnnnnnnnnnnnnnnnantgcactccaacctgggcnngcagagcaagactctgtctcaaaaggggaaaaaaaaaattgctgatgtgacccatgaagggaactcattttcctcgtaattttggactgccacacattggtacctttagttctctgaaggcccacgtttttatcattaagacctatttgttagctagtagagctttatgttcgctgtccatgaaaccttctgtaaccacagtgactacaagtagttctttctctattgaattattaggtccagaatagaagatgtcattgtacactttatttccctcacactgtgttangctctgatgtgctatgcttagctatctgtcagaga

SEQ ID NO: 30 - DNA, 485 bp, Homo sapiens
  misc_feature (1)..(485): 208835_s_at
gcgatacttacagagcttacttgcagaagtagaacgtaggatcagacgaggccatgctcgtttggcattatctcaaaaccagcagtcttctggggccgctggcccaacaggcaaaaatgaagaaaaaattcaggttctaacagacaaaattgatgtacttctgcaacagattgaagaattagggtctgaaggaaaagtagaagaagcccaggggatgatgaaattagttgagcaattaaaagaagagagagaactgctaaggtccacaacgtcgacaattgaaagctttgctgcacaagaaaaacaaatggaagtttgtgaagtatgtggagcctttttaatagtaggagatgcccagtcccgggtagatgaccatttgatgggaaaacaacacatgggctatgccaaaattaaagctactgtagaagaattaaaagaaaagttaaggaaaagaaccgaagaacctgatcgtgatgagcgtctaa

SEQ ID NO: 31 - DNA, 364 bp, Homo sapiens
  misc_feature (1)..(364): 218049_s_at
agtatactcttcgcatactggctacccaggtggatttagacaagtaacagctgctcagcttcacctgagggatccagtggcaattgtaaaactagctatttatggcatgctgccaaaaaaccttcacagaagaacaatgatggaaaggttgcatctttttccagatgagtatattccagaagatattcttaagaatttagtagaggagcttcctcaaccacgaaaaatacctaaacgtctagatgagtacacaagaagaaatagacgcctttccaagattgtggactccacctgaagaatatcggctataagagaataagaatgcagaaaataacagtgaagtgattgaaactttcttctgatg

SEQ ID NO: 32 - DNA, 549 bp, Homo sapiens
  misc_feature (1)..(549): 217824_at
  misc_feature (45)..(45): n is a, c, g, or t
  misc_feature (46)..(46): n is a, c, g, or t
  misc_feature (47)..(47): n is a, c, g, or t
  misc_feature (60)..(60): n is a, c, g, or t
  misc_feature (93)..(93): n is a, c, g, or t
  misc_feature (96)..(96): n is a, c, g, or t
gtttcacctgtaactgtttaagccaataaacttttcaaaatttannnaatgtggggcttntatgtagcactttacgttttcatgctgcttatngtnttattctactgaaaaaaatgaatttcaagattctcaacttttttaatttcaaaaattgtttattgttttgactataggaatacaaaatttcctattttgggagaataagaactctttttgtcatttttggctatgaataaactttctggtcttttgagaccacccatttttatagatcagaatcagaaaacaggtaaacctcactcacacatttggactcatttgaacaaaaatctaggccaaaatactgaaaagcctatgtgtttttttaattggaagtatatgtaaggttaatgcatttagtgaacgtgactaacaaagactaatgtgcacattaacagatgtactttttaaggttttatgggaggctgtgcattgctcaaaagctgttgggaacgccttctgaacagttgccttcagaactagtttgagctgctcaataaaaccagtgac

SEQ ID NO: 33 - DNA, 410 bp, Homo sapiens
  misc_feature (1)..(410): 220059_at
attacctatattctcctgatactgattaccaagtcattcacctgaacaccagaattagaattaaacattgtaccatacaatttcattatcttatcagaatgaaaccaattcacagggaaactagagactacggctgtggtggtaacctgcagatatacacattcccatgcactgacataagttgaaaacacatagtactttctagatggaatttttttctttaggcctcaatgaaatacatttcccctatataattccaacagcagtttctctagttctaaattttaccaattcccaaaaaacctaagttttgctgaaatctgatttgaccaatttatcaaatatgtcattttaattacctagctggaagttagagacatgaaatgtactagaggagcccttttccaatg

SEQ ID NO: 34 - DNA, 504 bp, Homo sapiens
  misc_feature (1)..(504): 202942_at
ggccatgggtgcagaccgaggtatccacgtggaggtgcccccagcagaagcagaacgcttgggtcccctgcaggtggctcgggtcctggccaagctggcagagaaggagaaggtggacctggtgctgctgggcaaacaggccatcgatgatgactgtaaccagacagggcagatgacagctggatttcttgactggccacagggcacattcgcctcccaggtgacgctggagggggacaagttgaaagtggagcgggagatcgatgggggcctggagaccctgcgcctgaagctgccagctgtggtgacagctgacctgaggctcaacgagccccgctacgccacgctgcccaacatcatgaaagccaagaagaagaagatcgaggtgatcaagcctggggacctgggtgtggacctgacctccaagctctctgtgatcagtgtggaggacccgccccagcgcacggccggcgtcaaggtggagaccactgaggacctggtggc

SEQ ID NO: 35 - DNA, 513 bp, Homo sapiens
  misc_feature (1)..(513): 200986_at
gacgaccagccaggatatgctctcaatcatggagaaattggaattcttcgatttttcttatgaccttaacctgtgtgggctgacagaggacccagatcttcaggtttctgcgatgcagcaccagacagtgctggaactgacagagactggggtggaggcggctgcagcctccgccatctctgtggcccgcaccctgctggtctttgaagtgcagcagcccttcctcttcgtgctctgggaccagcagcacaagttccctgtcttcatggggcgagtatatgaccccagggcctgagacctgcaggatcaggttagggcgagcgctacctctccagcctcagctctcagttgcagccctgctgctgcctgcctggacttgcccctgccacctcctgcctcaggtgtccgctatccaccaaaagggctcctgagggtctgggcaagggacctgcttctattagcccttctccatggccctgccatgctctccaaaccactttttgcagctttctc

SEQ ID NO: 36 - DNA, 465 bp, Homo sapiens
  misc_feature (1)..(465): 221652_s_at
ggccagtgtcgttattatccttgtggagaatagaatcaatactgccaattccagaaaacatcaggaatttgctggacgtttgaactctgttaataacagagctgaactatatcaacatcttaaagaggaaaatgggatggagacaacagaaaatggaaaagccagccggcagtgaagagtgacttgaagaactaaatttagcatattgcaaaaatattttgtgcggaattcgatataagtacttttacagcaagatggtatagttatgttgcctggactggtttttacatttttaaaatatttcagctgtcatttttgtactaattataaaattggcacataattcaaaaatatacatttgagatgatttgtcctcccaaattatacaagtttattttatggtataaagtgttctctctggaaatgtttttaaaaaaattcttaggcttctctttgcgaaataaa

SEQ ID NO: 37 - DNA, 195 bp, Homo sapiens
  misc_feature (1)..(195): 211456_x_at
gccggctcctgcaagtgcaaaaagtgcaaatgcacctcctgcaagaagagctgctgctcctgttgccccctgggctgtgccaagtgtgcccagggctgcatccgcaaaggggcttcggaaaagtgcagctgctgtgcctgatgtcgggactgccctgctctcggatgaaaacagaatgacacgtaaagtccggga

SEQ ID NO: 38 - DNA, 334 bp, Homo sapiens
  misc_feature (1)..(334): 201487_at
gactcagcctctgggatggattactggattgttaaaaacagctggggcaccggctggggtgagaatggctacttccggatccgcagaggaactgatgagtgtgcaattgagagcatagcagtggcagccacaccaattcctaaattgtagggtatgccttccagtatttcataatgatctgcatcagttgtaaaggggaattggtatattcacagactgtagactttcagcagcaatctcagaagcttacaaatagatttccatgaagatatttgtcttcagaattaaaactgcccttaattttaatatacctttcaatcggccactggccatt

SEQ ID NO: 39 - DNA, 503 bp, Homo sapiens
  misc_feature (1)..(503): 220668_s_at
ggcacaggtccccagatgagaagtctgctaccctcatttctcatctttttactaaactcagaggcagtgacagcagtcagggacagacatacatttctcataccttccccacatctgagagatgacagggaaaactgcaaagctcggtgctccctttggagattttttaatccttttttattccataagaagtcgtttttagggagaacgggaattcagacaagctgcatttcagaaatgctgtcataatggtttttaacaccttttactcttcttactggtgctattttgtagaataaggaacaacgttgacaagttttgtggggctttttatacactttttaaaatctcaaacttctatttttatgtttaacgttttcattaaaatttttttgtaactggagccacgacgtaacaaatatggggaaaaaactgtgccttgtttcaacagtttttgctaatttttaggctgaaagatgacggatgcctagagtttaccttat

SEQ ID NO: 40 - DNA, 440 bp, Homo sapiens
  misc_feature (1)..(440): 215088_s_at
  misc_feature (27)..(27): n is a, c, g, or t
  misc_feature (50)..(50): n is a, c, g, or t
  misc_feature (51)..(51): n is a, c, g, or t
  misc_feature (52)..(52): n is a, c, g, or t
  misc_feature (75)..(75): n is a, c, g, or t
  misc_feature (89)..(89): n is a, c, g, or t
  misc_feature (90)..(90): n is a, c, g, or t
  misc_feature (92)..(92): n is a, c, g, or t
  misc_feature (103)..(103): n is a, c, g, or t
  misc_feature (108)..(108): n is a, c, g, or t
  misc_feature (112)..(112): n is a, c, g, or t
  misc_feature (113)..(113): n is a, c, g, or t
  misc_feature (115)..(115): n is a, c, g, or t
  misc_feature (117)..(117): n is a, c, g, or t
  misc_feature (118)..(118): n is a, c, g, or t
  misc_feature (124)..(124): n is a, c, g, or t
  misc_feature (129)..(129): n is a, c, g, or t
  misc_feature (133)..(133): n is a, c, g, or t
  misc_feature (140)..(140): n is a, c, g, or t
  misc_feature (142)..(142): n is a, c, g, or t
  misc_feature (151)..(151): n is a, c, g, or t
  misc_feature (152)..(152): n is a, c, g, or t
  misc_feature (153)..(153): n is a, c, g, or t
  misc_feature (155)..(155): n is a, c, g, or t
  misc_feature (156)..(156): n is a, c, g, or t
  misc_feature (157)..(157): n is a, c, g, or t
  misc_feature (158)..(158): n is a, c, g, or t
  misc_feature (159)..(159): n is a, c, g, or t
  misc_feature (160)..(160): n is a, c, g, or t
  misc_feature (267)..(267): n is a, c, g, or t
  misc_feature (282)..(282): n is a, c, g, or t
gatttgtgctgagggtcagcttttggnctccttcttcctgagacagtggnnncaatgccagctctgtggcttctngccctggggatggnncngggttgggggntgggntggnnangnntttggntgccnctgnctgtggntngctggcttnnngnnnnnntctcttcattggtgagagcccaggccattaacacctacacagtgttattgaaagaagagaggtgggggtggaggggaattagtctgtcccagctagagggagataangagggctagttagtncttggagcagctgcttttgaggagaaaatatatagctttggacacgaggaagatctagaaaattatcattgaacatattaatggttatttctttttcttggatttccagaaaagcctcttaattttatgctttctcatcgaagtaatgtacccttttt

SEQ ID NO: 41 - DNA, 303 bp, Homo sapiens
  misc_feature (1)..(303): 205394_at
gaatcctggtgaatatagtgctgctatgttgacattattcttcctagagaagattatcctgtcctgcaaactgcaaatagtagttcctgaagtgttcacttccctgtttatccaaacatcttccaatttattttgtttgttcggcatacaaataatacctatatcttaattgtaagcaaaactttggggaaaggatgaatagaattcatttgattatttcttcatgtgtgtttagtatctgaatttgaaactcatctggtggaaaccaagtttcaggggacatgagttttccagcttttatac

SEQ ID NO: 42 - DNA, 427 bp, Homo sapiens
  misc_feature (1)..(427): 218364_at
agtaactgggcactcggaggccttggcacgggttctggaggacagacagcaattctatgagtgctcactgagatacttgctggagacctcagaaaacacaagtgccttctccacggtgcaattcagacttcagtgatctccagtggtcaaaagacatttacccttaatatcagacaacatttatattttagtgaagaaacaagttctcgggtggggaatctatgtttcactcagatttatatgtttggaggaaaaaaagcctttttttgtaaaatatttaaatttatataagaaaatgttagaaaaaaatatggggagtgtatataaaacttgctttattgcatggggcaggggaagtccaggcctaatactcctaaagtaagagttgggtcctttttttcttcaatacaactgtgctgtaccttgt

SEQ ID NO: 43 - DNA, 227 bp, Homo sapiens
  misc_feature (1)..(227): 222010_at
  misc_feature (77)..(77): n is a, c, g, or t
gggtcacaagaattcgacagccagatgctccaagagggtggcccaaggctatagcccctccttcaatattgacctancgggggagaaaagatttagattgtttattcttctgtggacacagtttaaaatcttaaacttgtctttttcctcttaatgtatcagcatgctaccctttcaaactcaaattttcattttaactgcttaggaataaatttacacctttgtga

SEQ ID NO: 44 - DNA, 209 bp, Homo sapiens
  misc_feature (1)..(209): 218286_s_at
aatccagtgccctacaaaggctagaacactacaggggatgaattcttcaaataggagccgatggatctgtggtcctttgggactcatcaaagccttggtttagcattttgtcagttttatcttcagaaattctctgtgattaagaagataatttattaaaggtggtccttcctacctctgtggtgtgtgtcgcgcacacagcttagaag

SEQ ID NO: 45 - DNA, 515 bp, Homo sapiens
  misc_feature (1)..(515): 208955_at
gtagttacgagttttccctcagtgaagtagcaataggctgtaatcaagaaaatatgccatttatagagataagataaatgaaataatacttcagccaccaggtttttctgtctcacatacataagcagcatttcattgcagatatgggactgattctgtggcttaccttgattaacatcttttggaagttttgctagtgtgctttcctttctttactatgtttctcagattcctttgtatcagggttttgggtgtcacttaggttttgtccatcagattctgtgagacaccaggcatcgttttgaggatgtgggttatacacatggagtgcttctggaactatcagcccacttgaccacccagtttgtggaagcacaggcaagagtgttcttttctggtgattctccaggccatttaataccctgcaatgtaattgtccctctgtggctcacatttcattagtgagccatgaaatcaactcagtgggacatagccagcatttttgcataccaggt

SEQ ID NO: 46 - DNA, 436 bp, Homo sapiens
  misc_feature (1)..(436): 210715_s_at
ttcgtgatggtgttgatcctcttcctgggagcctccatggtctacctgatccgggtggcacggaggaaccaggagcgtgccctgcgcaccgtctggagctccggacatgacaaggagcagctggtgaagaacacatatgtcctgtgaccgccctgtcgccaagaggactggggaagggaggggagactatgtgtgagctttttttaaatagcgggattgactcggatttgagtgatcattagggctgaggtgtgtttctctgggaggtaggacggctgcttcctggtctggcagggatgggtttgctttggaaatcctctaggaggctcctcctcgcatggcctgcagtctggcagcagccccgagttgtttcctcgctgatcgatttctttcctccaggtagagttttctttgcttatgttgaattccattgcct

SEQ ID NO: 47 - DNA, 472 bp, Homo sapiens
  misc_feature (1)..(472): 218055_s_at
taaaaatagcctttctcctgcaaattttcctagtctttagtaactgttagtgttctatatagcacaaacttgaatctctcagccaaaaaagggaacatatatactgtttaagtatggcaagttttctttggtaccaatttgtttagataattttaaaaatgttttttagttctagctactaaaacctgtatgaactcaaatggataggcatcttgtgagggtgtgtttttcccagtgtgaattggcttgaagagccatgggctaaatgggtactagaacaacaactgcccctcatgtacgccaaggatgagctctagatcatttgagaggcacagtgtttccggagtcagggactgcagctgagcgcaactgccccatctgaccactgactcaaatacgaactgcttgagacagacttcttttatgtagttctttgcagtgtccattgagacactataaccagccttgtaac

SEQ ID NO: 48 - DNA, 482 bp, Homo sapiens
  misc_feature (1)..(482): 202946_s_at
aaccctattgtcctttatgcattttcaatgaaatggaatgaaggctaatatgcttgctttatttacttttgtaatcttggattttgtagcttttaaaactagaaaccattgttctaacaaagcaggcaactttattctataaacacaactttattaagcagaatacactgtagatgcttttccccaacgtatctggctggcagtctttgtcgttgttcattctggggataaaggggaactaggctagcagttctaatgtgacattctttaagcatatcttaaaatagtatttaagtaaatggtctaatttctacataattattgcactgaacttttttgtttattaaggtgtttaaataagctcagctaattcaagacactgtagtcacttgtgcatcagtgtgcttgaatttagtagcttacagcattatttatgaaggaaaaaatacataaatatgaagtacctcatgttgaatgttatt

SEQ ID NO: 49 - DNA, 515 bp, Homo sapiens
  misc_feature (1)..(515): 201397_at
gcaccaggggagcaaggcttcggggaatgcctcctggccgtggccctggcaggcgccccttaccaggctgtgggcttggtccaaggcactacacctgtactgcaggggctcaatggagctgtcttcaggccagaagtgcctctccgcagggacctgcccctgctcctattccggactcagacctctgaccctgcaatgctgcctaccatgattggcctcctggcagaggcaggcgtgcggctgctgtcctaccagacttcactggtgtcagatggggagacctggcacgtcatgggcatctcctccttgctgcccagcctggaagcgtggaagcagcatgtgactgaagccttccagttccacttctaaccttggagctcactggtccctgcctctggggcttttctgaagaaacccacccactgtgatcaatagggagagaaaatccacattcttgggctgaacgcgggcctctgacactgcttacactgcactctgaccctgtagtacagcaa

SEQ ID NO: 50 - DNA, 549 bp, Homo sapiens
  misc_feature (1)..(549): 204050_s_at
ggaacgcttggaagcccttgatgccaattctcggaagcaagaagcagagtggaaagaaaaggcaataaaggagctagaagaatggtatgcaagacaggacgagcagctacagaaaacaaaagcaaacaacagggcagcagaagaagcctttgtaaatgacattgacgagtcgtccccaggcactgagtgggaacgggtggcccggctgtgtgactttaaccccaagtctagcaagcaggccaaagatgtctcccgcatgcgctcagtcctcatctccctcaagcaggccccgctggtgcactgaagagccaccctgtggaaacactacatctgcaatatcttaatcctactcagtgaagctcttcacagtcattggattaattatgttgagttcttttggaccaaacctttttgtctttagagttgttcattgtttgtgattgcatgtttccttccttcaactgtgttctccctggcattcagagaggagggagaggaggaagaggaaggggagggaagcttcccaagagtagcctcaacctgtgcttc

SEQ ID NO: 51 - DNA, 451 bp, Homo sapiens
  misc_feature (1)..(451): 201425_at
ggcactgtgtgggtcaactgctatgatgtgtttggagcccagtcaccctttggtggctacaagatgtcggggagtggccgggagttgggcgagtacgggctgcaggcatacactgaagtgaaaactgtcacagtcaaagtgcctcagaagaactcataagaatcatgcaagcttcctccctcagccattgatggaaagttcagcaagatcagcaacaaaaccaagaaaaatgatccttgcgtgctgaatatctgaaaagagaaatttttcctacaaaatctcttgggtcaagaaagttctagaatttgaattgataaacatggtgggttggctgagggtaagagtatatgaggaaccttttaaacgacaacaatactgctagctttcaggatgatttttaaaaaatagattcaaatgtgttatcctctctctgaaacgcttcctataactc

SEQ ID NO: 52 - DNA, 509 bp, Homo sapiens
  misc_feature (1)..(509): 204484_at
cccgccccagatggattttacatttgctcttttgtgtttcgctccaaagggttgtcttcctcgccaaaaggagggagggactttgaatttgatatgaatctttaaaaccagaattggctggatatttcccatgattgggaaaagagtgaaatgaggacattctgtaaactgtccctccctaattccaaggatcagaaactccccgttttgctgactcattccataactggagaaagaagctccattgaccgaagccacagggcagcatggaagtttaaattttctctaaaattaaaatgccaaggataaagctggctgcttccaggagggggaagaggagtggggagtgggcggtgaaacttttccagatgaacggaccataaatgtgttactggctttgtgcctgtagctcattttattatgacctatatgctcctgatttaaagagatctgtgtactgtttacttcccacttcccagaatcccttgtatctcctttctcgggaattg

SEQ ID NO: 53 - DNA, 345 bp, Homo sapiens
  misc_feature (1)..(345): 212072_s_at
tttgaattcatttagttactgggcataacttactgctttttacaaaagaaacaaacattgtctgtacaggtttcatgctagagctaatgggagatgtggccacactgacttccattttaagctttctaccttcttttcctccgaccgtccccttccctcacatgccatccagtgagaagacctgctcctcagtcttgtaaatgtatcttgagaggtaggagcagagccactatctccattgaagctgaaatggtagacctgtaattgtgggaaaactataaactctcttgttacagccccgccaccccttgctgtgtgtatatatataatactttgtccttcata

SEQ ID NO: 54 - DNA, 492 bp, Homo sapiens
  misc_feature (1)..(492): 215905_s_at
gagatgttcttggtcacctgatggaagcaaaatagcagctggctcagccgacaggtttgtttatgtgtgggataccacaagcaggagaatattgtataagctgcccggccatgctggctccatcaatgaagtggctttccaccctgatgagcccatcattatctcagcatcgagtgacaagagactgtatatgggagagattcagtgaagatatggactggaagactccaaggccgcttgtctttgagacctcagactgcataagtgatgccaaatgttggatgtccaggctagcaccctcccttcagatgaccattgctagcaagaaacaggaggcggtggccatattccaaaaaccacttctgtcccatttcaccaggatgactaaggcaagctccctgtggcctctaaaaaccacctgccagatttcagggactgtttttttttttctttttcttttttcctgttttctaatgcaggcccaatgtgaca

SEQ ID NO: 55 - DNA, 442 bp, Homo sapiens
  misc_feature (1)..(442): 201827_at
agaggaggtgcagcctagactcttcctagcctttctaaaccaaagttctttgccattcctacaagcccagccttgctgctggttttttcctttcctttgggtatttgcactattttgggagcaagttttctatgtgggagccactttttttgtacaggggtaagttgggggttttcagggagcctgttaggtgcctccttcttttctttcctcaatctatgcaagcggctctggccgccatcatctcctgggatgccagagggctgcctctccagcggcttgggccggggaggggacactccagttctctagcatggcctgaggtatggggtatgtgcatgtggaggccagggtaaggtgaatggggaggctgggaggactggtgttgccctttggagcttggtgaggagggtgggcctagggcttggcgagtgccactttt

SEQ ID NO: 56 - DNA, 546 bp, Homo sapiens
  misc_feature (1)..(546): 211031_s_at
tttcccgtaacgcacaggacacgtgtgcaattcataggaacggcccagatcgccctcatgagtgccacctggtacaggtaggtggcgctcacgttcctgcccaaatgcagcccatcggggagtcacagtcagtccccccggcccccctcccagtccctgttggctttcggtagctctcgcatgcagttctattaacagccgtctagaagcgatgctttagtggcctaacccagggtcaaatacagctctttctagcaaaatcaggcagctctgccccatcggtaggggcaccgattagtctactaacagccagaggtccatctaggagggtgccgggaggagctgagcccccggaggtgggctcctggtgacgggtgtccaagaagcggtttccttgggagcttctgcctccgtgggcctctcagcccgccccgtgtggccgcccgggtgtggctcagccatgtcccctccccaggtccttcattcacccctcccctccccacagtggaattgttgaagtgtggcgagtctgtgctcgggacaata

SEQ ID NO: 57 - DNA, 481 bp, Homo sapiens
  misc_feature (1)..(481): 217963_s_at
gaagaccgccctttgggaggaggtgaaggccaccagcctgcaggaaatcgacggggacaggctcgccgacttgcccctaattttcgatgggccatacccaataggcagatcaatgatgggatgggtggagatggagatgatatggaaatattcatggaggagatgagagaaatcagaagaaaacttagggagctgcagttgaggaattgtctgcgtatccttatgggggagctctctaatcaccatgaccatcatgatgaattttgccttatgccttgactcctgccatttatcatgagattaatactgtgattcccgctgttttctttttccttgcattttcctaatatgcctttactgatccgtttgctgtgaaccctatgttatttccatgtgtcaagtgggtcttgtgttgccagcttctatttgaagattgcctttgcactcagtgtaagtttctgtcagcagtagtttcacccat

SEQ ID NO: 58 - DNA, 266 bp, Homo sapiens
  misc_feature (1)..(266): 208029_s_at
attttctccatggcctgaattaagaccattagaaagcaccaggccgtgggagcagtgaccatctgctgactgttcttgtggatcttgtgtccagggacatggggtgacatgcctcgtatgtgttagagggtggaatggatgtgtttggcgctgcatgggatctggtgcccctcttctcctggattcacatccccacccagggcccgcttttactaagtgttctgccctagattggttcaaggaggtcatccaactgactttatcaa

SEQ ID NO: 59 - DNA, 530 bp, Homo sapiens
  misc_feature (1)..(530): 202184_s_at
atgaaatctgtataagtgtgtccttatacaaattttaggctataaacaagtgtaagtttgtacaatttcataacatgtatagctgagtttttatactttatatgtaggaagctaatataaaatagttatgtaactgtgattttggttttcagttatgtgacttgttttttccacctgaaatgtgtcagttgttgttcctgtactcggtgccctttctttttactctcacgtggtcccaggttctggagttcttgtcctggttctagctgctcacatgtacaaatcacttctaggcctcagttttctgcgactatgaaaattactagattgcactagcttgtctctaaaattgctgtgactccagatactttgcactgaagagaatctagggtgtttgatatctgtttcagttagggctaatgggaaatgtctagtaagataaatgtcaacttttgctgacttattatgagatgaaaaaccaaaggagagtgggcctaactcatgtgagcttgataactgatgaactcatt

SEQ ID NO: 60 - DNA, 545 bp, Homo sapiens
  misc_feature (1)..(545): 214228_x_at
  misc_feature (66)..(66): n is a, c, g, or t
  misc_feature (363)..(363): n is a, c, g, or t
ccggccagcaatagctcggacgcaatctgtgaggacagggaccccccagccacgcagccccagganacccagggccccccggccaggcccatcactgtccagcccactgaagcctggcccagaacctcacagggaccctccacccggcccgtggaggtccccgggggccgtgcggttgccgccatcctgggcctgggcctggtgctggggctgctgggccccctggccatcctgctggccctgtacctgctccggagggaccagaggctgccccccgatgcccacaagccccctgggggaggcagtttccggacccccatccaagaggagcaggccgacgcccactccaccctggccaagatntgacctgggcccaccaaggtggacgctgggccccgccaggctggagcccggagggtctgctgggcgagcagggcaggtgcaggccgcctgccccgccacgctcctgggccaactctgcaccgttctaggtgccgatggctgcctccggctctctgcttacgtatgccatgcatacctcctgc

SEQ ID NO: 61 - DNA, 365 bp, Homo sapiens
  misc_feature (1)..(365): 214113_s_at
aattccaagtgaagcagcacagtgctgagaaacagttcatccatggtgccatgttaaagaagttggaaatatatcttgaaaatcctatcttccttttaggcttgaatatgatgctgaacagtaagtttgttaaatcttggaacttaaaacaatcctgctttctcaagtactattctaacattgcgctttataagggatgatatttctaccacctcactcatatttttagctgaaatgattttcctggtatgtctgttattttgtggaaaaagaaatattgtgtaaaatgggtgctgccaaaattccaggccattttgcagggactctgaagtgacctttagtagtaatagtcttatgtgcagtaa

SEQ ID NO: 62 - DNA, 503 bp, Homo sapiens
  misc_feature (1)..(503): 217957_at
acggcaccaattacatcgagaccctcagagtgcagatccatgcaaattgtcgcatccgacgggtttacttctcagacagactctactcagaagatgagctgccggcagagttcaaactgtatctcccagttcagaacaaggcaaagcaataactggaattgtgactcgagggatagacccctggatgtgactcttctttttaaaaggaaactatgtggaggacgatgcaaaaacatatttatcttagtttgctctgctgtagttctgttatttatacttggtgttgcttgtcatggacaccggtgaacatgccgtaactctgtgactgcattgtaagtgcagtgggggtaagcagtcctgtgagtggcgcatgaacgctggagcttattccgccgcctgccccagtgtggggggagatacctttaccatgaacttacagaattaaagatggcccataaggaattccagaccaatatttcttcctgcggtttattctatgtttt

SEQ ID NO: 63 - DNA, 440 bp, Homo sapiens
  misc_feature (1)..(440): 218622_at
caatccggttttatgatcttttggcccaacaggctattttatctcttgaatcagaacaagtgccattaatgtcagcacactggtgcttaaaaaacaccttcaaagttggagccgttgcaggaaatgattggttaatttgggatattactcggtccagttatcctcaaaataagagacctgttcacatggatcgagcctgcttattcaggtggtccacaattagtgaaaatctgtttgcaaccactggttatcctggcaaaatggcaagccagtttcaaattcatcatttaggacaccctcagcccatcctcatgggttctgtagccgttggatctggactgtcctggcatcgaactctccctctgtgtgtaattggaggagaccacaagctgttgttttgggtgactgaagtataaagtgttttctgtaccttagattca

SEQ ID NO: 64 - DNA, 432 bp, Homo sapiens
  misc_feature (1)..(432): 208937_s_at
ttcagccagtcgccaagaatcatgaaagtcgccagtggcagcaccgccaccgccgccgcgggccccacgtgcgcgctgaaggccggcaagacagcgagcggtgcgggcgaggtggtgcgctgtctgtctgagcagagcgtggccatctcgcgctgccggggcgccggggcgcgcctgcctgccctgctggacgagcagcaggtaaacgtgctgctctacgacatgaacggctgttactcacgcctcaaggagctggtgcccaccctgccccagaaccgcaaggtgagcaaggtggagattctccagcacgtcatcgactacatcagggaccttcagttggagctgaactcggaatccgaagttggaacccccgggggccgagggctgccggtccgggctccgctcagcaccctcaacggcgagatcagcgcc

SEQ ID NO: 65 - DNA, 535 bp, Homo sapiens
  misc_feature (1)..(535): 213258_at
aaaatagtatcagcttttttcacttaaggaaaataatacatcttcattcaaatattcagtgcataaataattgccttaaattgagtctttgctgtggaatttgagagttttggaaatcaaaggcccttgtgaaacatttcctgttgccatttatttatagatagcaatagcttcaaatgagtgggaaagtctacttaggtgaagtggtaaatagtcactaagattgtataaatagcgcattgatgagttgcctaattgttttctccaacaataaccactggtccattggttcactacttactcaagaaagacatatactgagatggcttgaaatgtttaatgcatgtgaacgttatttttaccgtgttttggaaaaagatcttgatgttattgtcttcctttattttccacaattaagtgcatctaactgtgaattgtatatggaattacattattcagcatatacatatatttacctgctttgttcattctctgtattcaaaattaacagatcatgctgaaaaccactcaaacg

SEQ ID NO: 66 - DNA, 525 bp, Homo sapiens
  misc_feature (1)..(525): 206480_at
ccaccacaccgacggtaccatgaaggacgaggtagctctactggctgctgtcaccctcctgggagtcctgctgcaagcctacttctccctgcaggtgatctcggcgcgcagggccttccgcgtgtcgccgccgctcaccaccggcccacccgagttcgagcgcgtctaccgagcccaggtgaactgcagcgagtacttcccgctgttcctcgccacgctctgggtcgccggcatcttctttcatgaaggggcggcggccctgtgcggcctggtctacctgttcgcgcgcctccgctacttccagggctacgcgcgctccgcgcagctcaggctggcaccgctgtacgcgagcgcgcgcgccctctggctgctggtggcgctggctgcgctcggcctgctcgcccacttcctcccggccgcgctgcgcgccgcgctcctcggacggctccggacgctgctgccgtgggcctgagaccaaggcccccgggccgacggagccgggaaagaagagccggagcctccagc

SEQ ID NO: 67 - DNA, 424 bp, Homo sapiens
  misc_feature (1)..(424): 203405_at
gataactattctcacatgtcgacatgttaccgattataaaacctcagaatccaccggcagccttccttctcctttcctgagagccctaaaaacacagaatttcaaagactcggcgtgttgtccattgctagaacaaccgaatatagtacacgaccttcctgcagcagttctaagctactgtcaagtatggaaaatcccagcaattctgtacttgtgttatactgatgtgatgaaattagacctaatcacagtggaagcttttaagcctatactttctaccagaagcttgaagggtttggttaagaatattccccaaagcactgagatactaaagaaattgatgacaacaaatgagattcagagtaacatttatacatgatcttaaacattgttttgtagtgtatattacttgtccattccttta

SEQ ID NO: 68 - DNA, 488 bp, Homo sapiens
  misc_feature (1)..(488): 202430_s_at
gatctctgattcattgtccattttactaccaaatattaactaaggccttattaatttttatataaattatatcttgtcctattaaatctagttacaatttatttcatgcataagagctaatgttattttgcaaatgccatatattcaaaaaagctcaaagataattttctttactattatgttcaaataatattcaatatgcatattatctttaaaaagttaaatgtttttttaatcttcaagaaatcatgctacacttaacttctcctagaagctaatctataccataatattttcatattcacaagatattaaattaccaattttcaaattattgttagtaaagaacaaaatgattctctcccaaagaaagacacattttaaatactccttcactctaaaactctggtattataacttttgaaagttaatatttctacatgaaatgtttagctcttacactctatccttcctagaaaatggtaatt

SEQ ID NO: 69 - DNA, 503 bp, Homo sapiens
  misc_feature (1)..(503): 218289_s_at
ttcttacctgaattgttatactttttgaaaatcctgtgacttgcctgtttctccccgctccaacgaaatcattaactctcctaaaatgtgtttcattctagtaagaaaacctcaaaggatattgtaggatataaatcttacttgaaaacatagctgttgaaacgttttggccttttggagtgggggaaggacaaatctgatcctgtaatctttttctttccagtaatcccttgtgtctgttgcatgaggacatggacaataaagtagtatatgatcctcagatacagggagaaggacaaggcatacagcttattgattagagctggcaagcatcttctcattatgtttggaattgctttctataagaaaattgcccactactactaacttgatcaacaatgaattcaaaatagttaacctatgaaataacatcctctcaaatgtttgctgatgaagtacaagttgaaatgtagttattggaaaagtctgtaacctgtggatca

SEQ ID NO: 70 - DNA, 506 bp, Homo sapiens
  misc_feature (1)..(506): 209757_s_at
cagatgccacataaggggtttgccatttgatacccctggggaacatttctgtaaataccattgacacatccgccttttgtatacatcctgggtaatgagaggtggcttttgcggccagtattagactggaagttcatacctaagtactgtaataatacctcaatgtttgaggagcatgttttgtatacaaatatattgttaatctctgttatgtactgtactaattcttacactgcctgtatactttagtatgacgctgatacataactaaatttgatacttatattttcgtatgaaaatgagttgtgaaagttttgagtagatattactttatcactttttgaactaagaaacttttgtaaagaaatttactatatatatatgcctttttcctagcctgtttcttcctgttaatgtatttgttcatgtttggtgcatagaactgggtaaatgcaaagttctgtgtttaatttcttcaaaatgtatatatttagtgctgcatctta

SEQ ID NO: 71 - DNA, 560 bp, Homo sapiens
  misc_feature (1)..(560): 210298_x_at
tctactgcgtgacttgccatgagaccaagtttgccaagcattgcgtgaagtgcaacaaggccatcacatctggaggaatcacttaccaggatcagccctggcatgccgattgctttgtgtgtgttacctgctctaagaagctggctgggcagcgtttcaccgctgtggaggaccagtattactgcgtggattgctacaagaactttgtggccaagaagtgtgctggatgcaagaaccccatcactgggaaaaggactgtgtcaagagtgagccgcccagtctctaaagctaggaagcccccagtgtgccacgggaaacgcttgcctctcaccctgtttcccagcgccaacctccggggcaggcatccgggtggagagaggacttgtccctcgtgggtggtggttctttatagaaaaaatcgaagcttagcagctcctcgtggcccgggtttggtaaaggctccagtgtggtggcctatgaaggacaatcctggcacgactactgcttccactgcaaaaaatgctccgtgaatctggccaacaagcgctttgttttccacc

SEQ ID NO: 72 - DNA, 553 bp, Homo sapiens
  misc_feature (1)..(553): 217814_at
gtatctgcacgagcacttagcttgttcagatctctgcattttataaatgcttcttaccaagaaagcatttttaggtcattgcttgtaccaggtaatttttgccggggatgggtaagggttgggttttctggtgggagtggggtggtgggtattttttgttgatgctttagtgcaggcctgttctgaggcaataacaagttgctgtgaaaacagcatgtgctgctgcctttgtaactgcatggaaacttttcacatgggtttttctccaagttaatacagaaatatgtaaactgagagatgcaaatgtaatatttttaacagttcatgaagttgttattaaaataactaacataaaacttaattactttaatattatataattatagtagtggccttgttttacaaacctttaaattacattttagaaatcaaagttgatagtcttagttatcttttgagtaagaaaagctttcctaaagtcccatacatttggaccatggcagctaattttgtaacttaagcattcatatgaactacctatggacatctatta

SEQ ID NO: 73 - DNA, 391 bp, Homo sapiens
  misc_feature (1)..(391): 201690_s_at
atgatactgtagaacctgtctcctactttgaaaactgaatgtcagggctgagtgaatcaaagtgtctagacatatttgcatagaggccaaggtattctattctaataactgcttactcaacactaccaccttttccttatactgtatatgattatggcctacaatgttgtatttgttatttattaaattgtgattgttttattattgtttatgccaaatgttaactgccaagcttggagtgacctaaagcattttttaaaagcatggctagatttacttcagtataaattatcttatgaaaaccaaattttaaaagccacaggtgttgattgttataaaataacatgctgccattcttgattgctagagtttttgttagtactttggatgc

SEQ ID NO: 74 - DNA, 416 bp, Homo sapiens
  misc_feature (1)..(416): 201923_at
gtgtccaactgaaattatcgcttttggcgacagacttgaagaattcagatctataaatactgaagtggtagcatgctctgttgattcacagtttacccatttggcctggattaatacccctcgaagacaaggaggacttgggccaataaggattccacttctttcagatttgacccatcagatctcaaaggactatggtgtatacctagaggactcaggccacactcttagaggtctcttcattattgatgacaaaggaatcctaagacaaattactctgaatgatcttcctgtgggtagatcagtggatgagacactacgtttggttcaagcattccagtacactgacaaacacggagaagtctgccctgctggctggaaacctggtagtgaaacaataatcccagatccagctg

SEQ ID NO: 75 - DNA, 178 bp, Homo sapiens
  misc_feature (1)..(178): 210665_at
aaatgatggttggaagaatgcggctcatatttaccaagtctttctgaacgccttctgcattcatgcatccatgttctttctaggattggatagcatttcatgcctatgttaatatttgtgcttttggcatttccttaatatttatatgtatacgtgatgcctttgtagcatactgcta

SEQ ID NO: 76 - DNA, 519 bp, Homo sapiens
  misc_feature (1)..(519): 212859_x_at
  misc_feature (130)..(130): n is a, c, g, or t
  misc_feature (144)..(144): n is a, c, g, or t
  misc_feature (167)..(167): n is a, c, g, or t
  misc_feature (169)..(169): n is a, c, g, or t
  misc_feature (268)..(268): n is a, c, g, or t
  misc_feature (349)..(349): n is a, c, g, or t
  misc_feature (358)..(358): n is a, c, g, or t
  misc_feature (478)..(478): n is a, c, g, or t
caccgcgcagagctcagggggtggtgcgcccggcccttctgcggcgcacagcccagcccaggaacgcgggcggtgcggactcagcgggccgggtgcaggcgcggagctgggcctctgcgcccggcccganctccgtctataaanagagcagccagttgcagggctcnantctgctttccaactgcctgactgcttgttcgtctcactggtgtgagctccagcatcccctttgctcgaaatggaccccaactgctcttgcgccactggntggctcctgcacgtgcgccggctcctgcaagtgcaaagagtgcaaatgcacctcctgcaagaagagctgctgttcctgctnccccgtggnctgtgccaagtgtgcccagggctgcgtctgcaaaggggcatcggagaagtgcagctgctgtgcctgatgtgggaacagctcttctcccagatgtaaatagaacaacctgcacaacctggnatttttttaaaaatacaacactgagccatttgctgcatttc

SEQ ID NO: 77 - DNA, 383 bp, Homo sapiens
  misc_feature (1)..(383): 221504_s_at
tccccaagtcttagctgttgctgctcacgatgttggagaatatgtgcggcattatccacgaggcaaacgggtcatcgagcagctcggtgggaagcagctggtcatgaaccacatgcatcatgaagaccagcaggtccgctataatgctctgctggccgtgcagaagctcatggtgcacaactgggaataccttggcaagcagctccagtccgagcagccccagaccgctgccgcccgaagctaagcctcgcctctggccttcccctccgcctcaatgcagaaccagtagtgggagcactgtgtttagagttaagagtgaacactgtttgattttacttggaatttcctctgttatatagcttttcccaatgctaatttccaaa

SEQ ID NO: 78 - DNA, 512 bp, Homo sapiens
  misc_feature (1)..(512): 203739_at
agttttgcacttttatagcctatttttgaagattaacacatttgcaagatgattgactcaatctttgcctaatccaatgagtgttacagagagcttgctgtgactagaaccataaatcttaaagggggtatgtgataatagagggctggaatttaaacctgtatttaaaaaaaagaatcaccaaatctatttgaaaacaagtcgatttgtattatgctggaattttttgggctttcagatttctctttttaaccacatttctgaatgtataaaaataccaattattttcctacagccctttgtacttcaaaatatgtttttgtgtccatcagtattaactattggtatactactggttttatatttttttttctttgagacaacagtacatataatagaggtacaattcgttggatttttgtttatgtatttatttcattccagtttgatttattttaattgttgatacttaagttgtcaaacagtagacattacgtgttttatttatgata

SEQ ID NO: 79 - DNA, 475 bp, Homo sapiens
  misc_feature (1)..(475): 219593_at
gatggagcgcttacactacatccaccacaacgagaccgtgtcccagcagattggggaggtcctgtacaacgcggcaccactgtccatctggtggcagatccctcagtacctgctcattgggatcagtgagatctttgccagcatcccaggcctggagtttgcctactcagaggccccgcgctccatgcagggcgccatcatgggcatcttcttctgcctgtcgggggtgggctcactgttgggctccagcctagtggcactgctgtccttgcccgggggctggctgcactgccccaaggactttgggaacatcaacaattgccggatggacctctacttcttcctgctggctggcattcaggccgtcacggctctcctatttgtctggatcgctggacgctatgagagggcgtcccagggcccagcctcccacagccgtttcagcagggacaggggctgaacaggccctattcca

SEQ ID NO: 80 - DNA, 173 bp, Homo sapiens
  misc_feature (1)..(173): 204132_s_at
ggcaaagcagaccctcaaactgacacaagacctacagagaaaaccctttgccaaatctgctctcagcaagtggacagtgataccgtttacagcttaacacctttgtgaatcccacgccattttcctaacccagcagagactgttaatggccccttaccctgggtgaagcactt

SEQ ID NO: 81 - DNA, 484 bp, Homo sapiens
  misc_feature (1)..(484): 210972_x_at
ggaacaagacttcaggtcacgctcgatatccagaaccctgaccctgccgtgtaccagctgagagactctaaatccagtgacaagtctgtctgcctattcaccgattttgattctcaaacaaatgtgtcacaaagtaaggattctgatgtgtatatcacagacaaaactgtgctagacatgaggtctatggacttcaagagcaacagtgctgtggcctggagcaacaaatctgactttgcatgtgcaaacgccttcaacaacagcattattccagaagacaccttcttccccagcccagaaagttcctgtgatgtcaagctggtcgagaaaagctttgaaacagatacgaacctaaactttcaaaacctgtcagtgattgggttccgaatcctcctcctgaaagtggccgggtttaatctgctcatgacgctgcggctgtggtccagctgagatctgcaagattgtaagacagcctgtgctccct

SEQ ID NO: 82 - DNA, 553 bp, Homo sapiens
  misc_feature (1)..(553): 205220_at
gatctacttgtgacttgttggccttcttcccacatctgcctcagactggggggggctcagctcctcgggtgatatctagcctgcttgtgagctctagcagggataaggagagctgagattggagggaattgtgttgctcctggaggaagcccaggcatcattaaacaagccagtaggtcacctggcttccgtggaccaattcatctttcagacaagctttagagaaatggactcagggaagagactcacatgctttggttagtatctgtgtttccggtgggtgtaataggggattagccccagaagggactgagctaaacagtgttattatgggaaaggaaatggcattgctgctttcaaccagcgactaatgcaatccattcctctcttgtttatagtaatctaagggttgagcagttaaaacggcttcaggatagaaagctgtttcccacctgtttcgttttaccattaaaagggaaacgtgcctctgccccacgggtagagggggtgcacgttcctcctggttccttcgcttgtgtttctgtacttacca

SEQ ID NO: 83 - DNA, 481 bp, Homo sapiens
  misc_feature (1)..(481): 201235_s_at
ccggggctgcgtgagcgagcagaggcttaaggtcttcagcggggcgctccaggaggcactcacagagcactacaaacaccactggtttcccgaaaagccgtccaagggctccggctaccgctgcattcgcatcaaccacaagatggaccccatcatcagcagggtggccagccagatcggactcagccagccccagctgcaccagctgctgcccagcgagctgaccctgtgggtggacccctatgaggtgtcctaccgcattggggaggacggctccatctgcgtcttgtacgaggaggccccactggccgcctcctgtgggctcctcacctgcaagaaccaagtgctgctgggccggagcagcccctccaagaactacgtgatggcagtctccagctaggcccttccgcccccgccctgggcgccgccgtgctcatgctgccgtgacaacaggccaccacatacctcaacctggggaact

SEQ ID NO: 84 - DNA, 527 bp, Homo sapiens
  misc_feature (1)..(527): 209535_s_at
aaactttattgacttcatcctcctatttttatagcaacctagttttagatggtacaagttgaatttctatcacaagacaataaaataacatgaaagcattatcctagttaatgctatttcaacttaagaaatatctacattgaagtatttgataataattgtaaagttacttaaccgtatgtcatgttcagacagtatgtagcagctagtaacgtgcctggcacagagttgatgcttaataaatagttgctgaataaatgaaaaagaaaaacctgcctttggttgtgcatactttaatcactttctgatttagaaaaagatcagtctagagctcactactgcacactacatcaaactttgctgtaaacaaaagtaacaacttcaaacagaaaaatattacctgttagtgatagtcaacttatataaagagcccacacatttctatgcaaataattaaatttgatgttctgatgtttaacccttaggtaaagaaggccaaagtgtgctgactggctaatttgtatgct

SEQ ID NO: 85 - DNA, 527 bp, Homo sapiens
  misc_feature (1)..(527): 209671_x_at
tctcgaaccgaacagcagtgcttccaagataatctttggatcagggaccagactcagcatccggccaaatatccagaaccctgaccctgccgtgtaccagctgagagactctaaatccagtgacaagtctgtctgcctattcaccgattttgattctcaaacaaatgtgtcacaaagtaaggattctgatgtgtatatcacagacaaaactgtgctagacatgaggtctatggacttcaagagcaacagtgctgtggcctggagcaacaaatctgactttgcatgtgcaaacgccttcaacaacagcattattccagaagacaccttcttccccagcccagaaagttcctgtgatgtcaagctggtcgagaaaagctttgaaacagatacgaacctaaactttcaaaacctgtcagtgattgggttccgaatcctcctcctgaaagtggccgggtttaatctgctcatgacgctgcggctgtggtccagctgagatctgcaagattgtaagacagcctgtgctccct

SEQ ID NO: 86 - DNA, 484 bp, Homo sapiens
  misc_feature (1)..(484): 203945_at
atcatactggtcttgttgctgttgttccttcacatttaagtggtttttcatctttcctccctcctcccacagcctggctatacagtgcatccttgaactgtcagcccacagcagcaatatgcttattctatccacatccctaacatcatgcattcacaaggtcaaagttctggtccacaaacccttccctatagaagttcaatggctgcgaaagaatttgtagtaaaccaggcctcccaggatggcgagctccagtaagatgataatggaaagcagcagcttgttggttgtcactctacaaagagaagcaaagtggggagtagtcagaagtttggataaccttccttctaaacatttgggggttagacctgggaccacggctggatactctgaggctgtatgtttgatcacacagccacttagcaggaagtactcataaggttctttagctgtcacttagggataacactgtctacctcacaga

SEQ ID NO: 87 - DNA, 467 bp, Homo sapiens
  misc_feature (1)..(467): 219434_at
ccatgatcatggtttactgcgcgtccgaatggtcaaccttcaagtggaagattctggactgtatcagtgtgtgatctaccagcctcccaaggagcctcacatgctgttcgatcgcatccgcttggtggtgaccaagggtttttcagggacccctggctccaatgagaattctacccagaatgtgtataagattcctcctaccaccactaaggccttgtgcccactctataccagccccagaactgtgacccaagctccacccaagtcaactgccgatgtctccactcctgactctgaaatcaaccttacaaatgtgacagatatcatcagggttccggtgttcaacattgtcattctcctggctggtggattcctgagtaagagcctggtcttctctgtcctgtttgctgtcacgctgaggtcatttgtaccctaggcccacgaacccacgagaatgtcctctgact

SEQ ID NO: 88 - DNA, 443 bp, Homo sapiens
  misc_feature (1)..(443): 221558_s_at
agcttgtctggtaagtggcttctctgtgaattgcctgtaacacatagtggcttctccgcccttgtaaggtgttcagtagagctaaataaatgtaatagccaaaccccactctgttggtagcaattggcagccctatttcagtttattttttcttctgttttcttcttttctttttttaaacagtaaaccttaacagatgcgttcagcagactggtttgcagtgaattttcatttctttccttatcacccccttgttgtaaaaagcccagcacttgaattgttattactttaaatgttctgtatttgtatctgtttttattagccaattagtgggattttatgccagttgttaaaatgagcattgatgtacccattttttaaaaaagcaagcacagcctttgcccaaaactgtcatcctaacgtttgtcattccagtttgagtt

SEQ ID NO: 89 - DNA, 513 bp, Homo sapiens
  misc_feature (1)..(513): 214056_at
  misc_feature (385)..(385): n is a, c, g, or t
gacctgtgtgtgtaacaagcaagcctaataatagcaccatggttagactagcctgcttttccaagccatcattttataatttattaagcaaacaagggatcaaatgtctctccatccacctgatgtgatctttttatatgcacacagctaatgagttccattcagctgaaaatcttttagtaaaagctttaaagatgagcccatgaattcactttaaatttcaccagttaaattaggtcaaatggaaggaactcaaatgagtattgcccaatcagagcccattatttgtaagtcatcagtaaccttaaaactccacttagacctaattattgaaaacttgcatataatgaagtgaaagaatttccattcatcaacctctcaatcncaggttttcaaagaaaaacctatctaaggaatacttaccaaaatcagataagaaaatttaaacctgcatagttatcagattggtcccactacaaccagtctgcatacagttacacatcaattcgttct

SEQ ID NO: 90 - DNA, 468 bp, Homo sapiens
  misc_feature (1)..(468): 203907_s_at
gcagggcctcgcgtaaggaactgctggaacccactgagcccttcccggggtttcccgccgcacttagtgtgttccttcaggctagtgaggtttcattctgtttatttgcaagcttatcaaaagtttgtggaagatacattgttgggttccagaggctggagtcatgctgcccacatcttgtttgggaaagcaaaagctcccagtgagctggtgtccccgtgtgtctttcatgggactgtcccctttagagatcccacctgtcagagccacagcttcggggtcctgtcatcacatcccctgggaggggaggcaggaggaggccgagggccccaggatgtctgcctggtcccttctcactgtgaggacgcccttggcacacctttctcaagtcacacaaattattgcagttacatacagaattgctgacaggagcaggagacgctgagggaaacagctggcaatgtgaca

SEQ ID NO: 91 - DNA, 548 bp, Homo sapiens
  misc_feature (1)..(548): 217022_s_at
tcaagtgggaagagcgctgttcaaggaccacctgagcgtgacctctgtggctgctacagcgtgttccagtgtcctgccgggctgtgccgagccatggaaccatggggagaccttcacttgcactgctgcccaccccgagttgaagaccccactaaccgccaacatcacaaaatccggaaacacattccggcccgaggtccacctgctgccgccgccgtcggaggagctggccctgaacgagctggtgacgctgacgtgcctggcacgtggcttcagcccaaggatgtgctggttcgctggctgcaggggtcacaggagctgccccgcgagaagtacctgacttgggcatcccggcaggagcccagccagggcaccaccaccttcgctgtgaccagcatactgcgcgtggcagccgaggactggaagaagggggacaccttctcctgcatggtgggccacgaggccctgccgctggccttcacacagaagaccatcgaccgcttggcgggtaaacccacccatgtcaatgtgtctgttgtcatggcgga

SEQ ID NO: 92 - DNA, 531 bp, Homo sapiens
  misc_feature (1)..(531): 203413_at
gtgggcagctaaatgcagctttgttaatagctgagtgaactttcaattatgaaatttgtggagcttgacaaaatcacaaaaggaaaattactggggcaaaattagacctcaagtctgcctctactgtgtctcacatcaccatgtagaagaatgggcgtacagtatataccgtgacatcctgaaccctggatagaaagcctgagcccattggatctgtgaaagcctctagcttcactggtgcagaaaattttcctctagatcagaatcttcagaatcagttaggttcctcactgcaagaaataaaatgtcaggcagtgaatgaattatattttcagaagtaaagcaaagaagctataacatgttatgtacagtacactctgaaaagaaatctgaaacaagttattgtaatgataaaaataatgcacaggcatggttacttaatattttctaacaggaaaagtcatccctatttccttgttttactgcacttaatattatttggttgaatttgttcagtataagctcgttctt

SEQ ID NO: 93 - DNA, 467 bp, Homo sapiens
  misc_feature (1)..(467): 212074_at
aatgagatatctacaaggcacttaaagtgttacagatgttttaccttaagaattatttaagttgtgttgggttaagacagttttcagtgtaccgtaaatgttgtgttttcagaaaaagacaaaacgatggtgctgactggttttctgtatattgcacaacagtcctcaaatacactgatgtatgaaactattcatacatcaagcagcatttttttcactctccttagaattggaactatgcagttaaggcagataaaatgtacagatgtttcatatattacaggttacatatataaatcaaaatttcctatataaaactgatttgggatttggggtggaaatattttgaatattaatttatttttaaagatgcaagataggactttgtgcaatgtatttttgtaaatgcttttcaaaatatctgtctttggtagtgcttctgctgctgccaccaaattgataagatg

SEQ ID NO: 94 - DNA, 485 bp, Homo sapiens
  misc_feature (1)..(485): 220987_s_at
tctctgtttcttcaatggttctcttcccttttccatcctccaaacctggcctgagcctcctgaagttgctgctgtgaatctgaaagacttgaaaagcctccgcctgctgtgtggacttcatctcaaggggcccagcctcctctggactccaccttggacctcagtgactcagaacttctgcctctaagctgctctaaagtccagactatggatgtgttctctaggccttcaggactctagaatgtccatatttatttttatgttcttggctttgtgttttaggaaaagtgaatcttgctgttttcaataatgtgaatgctatgttctgggaaaatccactatgacatctaagttttgtgtacagagagatatttttgcaactatttccacctcctcccacaaccccccacactccactccacactcttgagtctctttacctaatggtctctacctaatggacctccgtggccaaaaagtaccat

SEQ ID NO: 95 - DNA, 522 bp, Homo sapiens
  misc_feature (1)..(522): 212658_at
acgccaggcccagttaatgctagtctttcatgtgaaatgtgaagctgccatgttgccttttctcttagtaggataactagtagctggtacataatcactgaggagctatttcttaacatgcttttatagaccatgctaatgctagaccagtatttaagggctaatctcacacctccttagctgtaagagtctggcttagaacagacctctctgtgcaataacttgtggccactggaaatccctgggccggcatttgtattggggttgcaatgactcccaagggccaaaagagttaaaggcacgactgggatttcttctgagactgtggtgaaactccttccaaggctgagggggtcagtaggtgctctggagggactcggcaccacttgatattcaacagccacttgagccaaatataaaattgtatttacagctgatggactcaatttgagccttcaaacttgtagttatcctattatattgtaaactaatacattgtctagcattgatttggttcctgtg

SEQ ID NO: 96 - DNA, 531 bp, Homo sapiens
  misc_feature (1)..(531): 214467_at
tcataaaactacttgtcagcatcacagttacttttgtcttatgctttactccctttcatgtgatgttgctgattcgctgcattttagagcatgctgtgaacttcgaagaccacagcaattctgggaagcgaacttacacaatgtatagaatcacggttgcattaacaagtttaaattgtgttgctgatccaattctgtactgttttgtaaccgaaacaggaagatatgatatgtggaatatattaaaattctgcactgggaggtgtaatacatcacaaagacaaagaaaacgcatactttctgtgtctacaaaagatactatggaattagaggtccttgagtagaaccaaggatgttttgaagggaagggaagtttaagttatgcattattatatcatcaagattacattttgaaaaggaaatctagcatgtgaggggactaagtgttctcagagtgatgttttaatccagtccaataaaaatatcttaaaactgcattgtacagctccctccctgcgttttattaaatga

SEQ ID NO: 97 - DNA, 447 bp, Bacillus subtilis
  misc_feature (1)..(447): AFFX-DapX-3_at
agaagaagcagctgaagcagcccgcatattaggcgcagataaaagaattcagctaacgcttccagaccgcggcctaataatgagtgatcaggcaattcggtcaattgtcactgtcatcagaatctgtcggccaaaagcggtttttatgccgtataaaaaggatcgccatccggatcacggcaatgcggctgcactggtggaagaagcgatcttttccgccggaatccataaatataaagacgaaaaaagccttccggcgcataaagtcagcaaggtttactattatatgataaatggttttcatcagccggattttgttattgatatctcggatacaatagaggcaaagaaacaaagcctcaacgcctacaaaagccagtttatcccgtcaaaggattccgtttctactcctctgacgaatgggtatattgaaatcgttgaagcgag

SEQ ID NO: 98 - DNA, 547 bp, Homo sapiens
  misc_feature (1)..(547): 212812_at
agaatgcatatgtcccaatccacttctataggagtttaatcatattcacatgagtaaaatgatggaagaactctttaaggtaatcctttgggataaaggatcctgggaagttctctcaggtaaagaaagcttacagcagatttgtaatatatgtctggagagctatttataagaaatttaagaggattgttttgttttcctttattaaagatttaagcctttttactttgcaaaaagaaaactacaaaagttttatagatataactttgctaattttttaaacttttctgaaacgattagctgtagccaaattatgtggttacgttttgctacattagaatttgaaaatgcaatatgtgtggtaaatctactgtttgaaatttataatggtctctgatatgattcgaattttggtaacttttgaaagttattttccccctttagtcatggatttctatttgttttttaatgttaatttttctagaaagcatctgaattgactaggcttttcctatataaaaaactcaaaacttgttaactctgtact

SEQ ID NO: 99 - DNA, 437 bp, Homo sapiens
  misc_feature (1)..(437): 212579_at
attgcttaaaatggcgagttctatggatattatctagccccaagcccatatctgtacacttttgttcattttataataccagaaagaatgttctatcagtaaaagaaggttttaagtatgaatctccatttttgtggagtttttctaccctgtaaaaattaactttgtggttcccagtaattacagtaaggagtttttctatattttcacagttggatttatctaaggatatttctcagcatattaaggaatccttttctacatttgagcaaatactgaggttcatgttgtaccaaataataataaattgcttttgtgtttaatatgtaacacgtaagaacaattgaaattttcttctaagatttaatactagtcttttagtataaaggaatgtaactggagaaaaaaattaatgctacagccatttatcctgtgtt

SEQ ID NO: 100 - DNA, 547 bp, Homo sapiens
  misc_feature (1)..(547): 206133_at
ggaccagctcccctagaggagataaagcagcctatgacattctgaggagatgttctcagtgtggcatcctgcttcccctgccgatcctaaatcaacatcaggagaaatgccggtggttagcttcatcaaaaaggaaaacaagtgagaaatttcagctagatttggaaaaggaaaggtactacaaattcaaaagatttcacttttaacactggcattcctgcctacttgctgtggtggtcttgtgaaaggtgatgggttttattcgttgggctttaaaagaaaaggtttggcagaactaaaaacaaaactcacgtatcatctcaatagatacagaaaaggcttttgataaaattcaacttgacttcatgttaaaaaccctcaacaaaccaggcgtcgaaggaacatacctcaaaataataagagccatctatgacaaaaccacagccaacatcatactgaatgagcaaaagctggagcattactcttgagaagtagaacaaggcacttcagtcctattcaacatagtactggaagtctcgccacagca

SEQ ID NO: 101 - DNA, 484 bp, Homo sapiens
  misc_feature (1)..(484): 213797_at
  misc_feature (206)..(206): n is a, c, g, or t
  misc_feature (207)..(207): n is a, c, g, or t
  misc_feature (313)..(313): n is a, c, g, or t
tatgtgtgtggtacctgttgtgtccctttctcttcaaagatcctgagcaaaacaaagatacgctttccatttgatgatggagttgacatggaggcagtgcttgcattgctttgttcgcctatcatctggccacatgaggctgtcaagcaaaagaataggagtgtagttgagtagctggttggccctacatctctgagaagtgacgnnacactgggttggcataagatatcctaaaatcacgctggaaccttgggcaaggaagaatgtgagcaagagtagagagagtgcctggatttcatgtcagtgaagccangtcaccatatcatatttttgaatgaactctgagtcagttgaaatagggtaccatctaggtcagtttaagaagagtcagctcagagaaagcaagcataagggaaaatgtcacgtaaactagatcagggaacaaaatcctctccttgtggaaatatcccatgcagtttgttga

SEQ ID NO: 102 - DNA, 562 bp, Homo sapiens
  misc_feature (1)..(562): 213958_at
ctgctgagctgttgtcactgatcggtgggcgctgggggggtagggtagcacaccagctgtcccaggctttgctccgggcggtaactgcacttgggcagggaatatagccttcctgggcacaactagctgacaatgacaggttgactgtgtacccccaaccaaggagctggggcccaaggccagtcctgccccagagacactccaagtccgccaggggcacagaccagttctgcagtgactgtccctggacaatgggtctttattctgagtttcctatggtttacaaagagggccccagcccagccccaccacagatcccagagataggggcccagtctccatgggggcaaggagcatagagatgttttccaggaaggggctcagaagctgcactaggccccgagtccccatgtgtctccttgaattgatgaggatgctcctgggagggatgcgtgactatgtggtgttgcacccggggctgcaaacgtctccgtgcagcccccagagagaggcccatgggctcagaccaggctttgttgtcctgctctgagtatcctgagat

SEQ ID NO: 103 - DNA, 534 bp, Homo sapiens
  misc_feature (1)..(534): 204638_at
gctacgtgctgagtggggctgggaatttcatggacccctcaaagcggcaccagcgcaaggtccccaacggctatctgcgcttccactatgggactgaagactcactgggtggctttgcctatgtggagatcagctccaaagagatgactgtcacttacatcgaggcctcgggcaagtccctctttaagaccaggctgccgaggcgagccaggccctgaactcccatgactgcccagctctgaggcccgatctccactgttgggtgggtggcctgccgggaccctgctcacaggcaggcttttcctccaacctgtggcgctgcagcagggcaggaaggggaaacacagctgatgaactgtggtgccacatgacccttgtggcacagatgcccacgtatgtgaaacacacatggacatgtgtcccagccacagtgttatgctctgtggctggctcacctttgctgagttccggggtgcaatgggggagggagggagggaaagcttcctcctaaatcaagcatctttctgttactga

SEQ ID NO: 104 - DNA, 438 bp, Homo sapiens
  misc_feature (1)..(438): 202481_at
ccatggacaatgcatgccctcgttatcttgaaaagcatacttccacaggctgcactcgaggagatccacaaattctcaggaacctacacctgcatgaacactttcaaagggcggacatagagacaggatgaagacatgcttgaggagccacggagtttgggggccacagcacctgggcacacacccgagcacctgtccattggcatgcttctgctgggtgagcaggacagctcctgtccccagcgaagaatccggctgcccctgggccagtcccaggacctttgcacaggactgatgggtgtaactgacccccacagggaggcaggaaaacagccagaagccaccttgacacttttgaacatttccagttctgtagagtttattgtcaattgcttctcaagtctaaccagcctcagcagtgtgcatagaccatttcca

SEQ ID NO: 105 - DNA, 536 bp, Homo sapiens
  misc_feature (1)..(536): 204961_s_at
gtgtccctgctcgagggtgaagctgttgaggtcattcacaagctcctggacggctggtgggtcatcaggaaagacgacgtcacaggctactttccgtccatgtacctgcaaaagtcggggcaagacgtgtcccaggcccaacgccagatcaagcggggggcgccgccccgcaggtcgtccatccgcaacgcgcacagcatccatcagcggtcgcggaagcgcctcagccaggacgcctatcgccgcaacagcgtccgttttctgcagcagcgacgccgccaggcgcggccgggaccgcagagccccgggagcccgctcgaggaggagcggcagacgcagcgctctaaaccgcagccggcggtgcccccgcggccgagcgccgacctcatcctgaaccgctgcagcgagagcaccaagcggaagctggcgtctgccgtctgaggctggagcgcagtccccagctagcgtctcggcccttgccgccccgtgcctgtacatacgtgttctatagagcctggcgtctggacgccgagggc

SEQ ID NO: 106 - DNA, 295 bp, Homo sapiens
  misc_feature (1)..(295): 209448_at
agatttgtcagccctatctcaaacttgaatcaaaatttctggggtgtgggcacaataatctgtaattttctttgtttatacttcccctgatgccactggttccgatgccactggctggggggcctgctttgaaatgcttgtctgcagagtcacagcagccatgaaaaccttatgaccgtgcaaatgagctctgctctaaaattgttgacattcatgtctctgagttacaaaagtgctaattcactacatgtaattgtgtaagtaaacattgtgcctttactacttctttatgtaa

SEQ ID NO: 107 - DNA, 551 bp, Homo sapiens
  misc_feature (1)..(551): 203290_at
tgacctagcattattttctggccccatttatcatatcccttttctcctccaaatgtttctcctctcacctcttctgtgggacttaaattgctatatctgctcagagctcacaaatgcctttgaattatttccctgacttcctgatttttttcttttctcaagtgttacctactaagagatgcctggagtaagccacccagctacctaattcctcagtaacctccatctataatctccatggaagcaacaaattccctttatgagatatatgtcaaatttttccatctttcatccagggctgactgaaaccgtggctaagaattgggagactctcttgtttcaagccaatttaacatcatttaccagatcatttgtcatgtccagtaacacagaagcaaccaactacagtatagcctgataacatgttgatttcttagctgacgttaatatttctttcttccttgtgttcccacccttggcattgccacccacccctcaattaaggcaacaatgaagttaatggataccctctgcctttggctcagaaatgt

SEQ ID NO: 108 - DNA, 525 bp, Homo sapiens
  misc_feature (1)..(525): 215275_at
  misc_feature (319)..(319): n is a, c, g, or t
tagggactccaaaggcagctgacagcatctggctttcagttcctcagtcaccactactttgtaccaaattcactgttttggctctgaaatctaattttgagtttagcaaggatgtctgcattgctcatgcaaatgaactaagcgttcattggaatgacaccatcaccacccaaatgaaaagaactggctggaatattcatcagcctactaatgtcatctcccaacccactctccaaactccatcccaaaaaagcatccagttcagaattgcccactgttggcaaagaaagaatgtcactaatttatttacagggagcanatagcagggacttacagatgaaccaggccctgcgatttttggaaaatgagcaccaggaactgcaggccaagattgaatgcctgcaaggggacagagacctgtgcatcttggatacccaggacctacaagatcaactaaaaaggtcagaggctgagaaacctaccctggtgaccaaataacagaattggcaggttttgcttcaaaat

SEQ ID NO: 109 - DNA, 452 bp, Homo sapiens
  misc_feature (1)..(452): 221060_s_at
gattaacacatgctcacaaccatcctggtcattctcgaacatgttctattttttaactaatcacccctgatatatttttatttttatatatccagttttcatttttttacgtcttgcctataagctaatatcataaataaggttgtttaagacgtgcttcaaatatccatattaaccactatttttcaaggaagtatggaaaagtacactctgtcactttgtcactcgatgtcattccaaagttattgcctactaagtaatgactgtcatgaaagcagcattgaaataatttgtttaaagggggcactcttttaaacgggaagaaaatttccgcttcctggtcttatcatggacaatttgggctataggcatgaaggaagtgggattacctcaggaagtcaccttttcttgattccagaaacatatgggctgataaacccggggtgacctca

SEQ ID NO: 110 - DNA, 460 bp, Homo sapiens
  misc_feature (1)..(460): 212573_at
  misc_feature (62)..(62): n is a, c, g, or t
  misc_feature (182)..(182): n is a, c, g, or t
taaagatcttgctgtggctctgttatgttctgaggccttgggattagcctcttcctcattanggagctgattttctagtctgtggatcagctatgcctttggacacttctcttttccattgtgccttttgaatgttgtcttctcactcagcatcagcacttcgatctaaatgcagactaggnagttgggaggaggaaccaaagtgaaccatccttcatttattcagtcattcgttcatctgtcaaacacgtatttggacatcaaggttgcagagatgaacaatgcatggatttcatctttgaggagttcaaaacctagtggagagaacacatggtacaatcgtaacacatgaaggacaagtaagtgctgcagtaaaggtactaataacatgttccttggaacagaggaagaaaaaccacgaaaccatggaaattagggaagcctttacagagggtgtgac

SEQ ID NO: 111 - DNA, 519 bp, Homo sapiens
  misc_feature (1)..(519): 213193_x_at
  misc_feature (284)..(284): n is a, c, g, or t
tgactccagatactgcctgagcagccgcctgagggtctcggccaccttctggcagaacccccgcaaccacttccgctgtcaagtccagttctacgggctctcggagaatgacgagtggacccaggatagggccaaacccgtcacccagatcgtcagcgccgaggcctggggtagagcagactgtggctttacctcggtgtcctaccagcaaggggtcctgtctgccaccatcctctatgagatcctgctagggaaggccaccctgtatgctgtgctggtcagcncccttgtgttgatggccatggtcaagagaaaggatttctgaaggcagccctggaagtggagttaggagcttctaacccgtcatggtttcaatacacattcttcttttgccagcgcttctgaagagctgctctcacctctctgcatcccaatagatatccccctatgtgcatgcacacctgcacactcacggctgaaatctccctaacccagggggaccttagcatgcctaagtga

SEQ ID NO: 112 - DNA, 367 bp, Homo sapiens
  misc_feature (1)..(367): 205568_at
accctcattgtctgggtctattcccacacttactgagtacagatgaaggaaagtggtagcaatttaatcataactttcatttgctgaaaaacattatgagaaggcctcccttcctaagccacctctggtcttgctaagtcttgatcttgcttcctgccagcaccaaacattacattcaggggatttcctctggctcagtcttttccccttgaagttctctaatagatgttacttttgacaaaagatcgcctatgagttacaagcaccaggggatgctctacatcaagggatgcaccttcagtcaaactgtcaaaaagcccagaattcccaaaggcattaggtttcccaactgctttgtgctgatatc

SEQ ID NO: 113 - DNA, 484 bp, Homo sapiens
  misc_feature (1)..(484): 209281_s_at
gctgaaagggagttgcggcgtggccaaatcttgtggtttagaggtctgaacagaatccaaacacagattcgagtggtgaatgcatttcgtagttctttatatgaagggttagaaaaaccggaatcaagaagttcgattcacaactttatgacacatcctgagtttaggatagaagattcagagcctcatatcccccttattgatgacactgatgccgaagatgatgctcctacaaaacgtaactccagtcctccaccctctcccaacaaaaataacaatgctgttgacagtggaattcaccttacaatagaaatgaacaagtctgctacctcttcatccccaggaagcccactacatagtttggaaacatcactctgattgtaagctgaatgttaacacactagctgcattgtaaagaaacaaattgaaactgggtcttttcacatattgtgatggacaagctagtattcttgtctttggactt

SEQ ID NO: 114 - DNA, 481 bp, Homo sapiens
  misc_feature (1)..(481): 204912_at
taggccatttggactctgccttcaaacaaaggcagttcagtccacaggcatggaagctgtgaggggacaggcctgtgcgtgccatccagagtcatctcagccctgcctttctctggagcattctgaaaacagatattctggcccagggaatccagccatgacccccacccctctgccaaagtactcttaggtgccagtctggtaactgaactccctctggaggcaggcttgagggaggattcctcagggttcccttgaaagctttatttatttattttgttcatttatttattggagaggcagcattgcacagtgaaagaattctggatatctcaggagccccgaaattctagctctgactttgctgtttccagtggtatgaccttggagaagtcacttatcctcttggagcctcagtttcctcatctgcagaataatgactgacttgtctaattcatagggatgtgaggttctgctgagg

SEQ ID NO: 115 - DNA, 442 bp, Homo sapiens
  misc_feature (1)..(442): 219099_at
aatggactgactgaaactcgctaaggttaaatctgcatcaaaatctaaccaatttgagcctctgaagggagtgccattggctttatttacttctctcctctgctagtcctgatttggaaacagttaaaagccaatttttagctccagtggaaccatagccacataaaactttaatggacaaccatatagaattaacttattttgtccaagtacagttggcattttccagaataattttaccaccctgctagatgtcatctctggattgcacatggatgatgaaggaactcagcattgaaagttgggggattagtaaccttgttacaacggtttctttttcattttagcctattttaatggctattggtaagatactgtatgtttttagtatctcatccagtgcttagaagaaagaatggtttataattcccagtacatgttt

SEQ ID NO: 116 - DNA, 483 bp, Homo sapiens
  misc_feature (1)..(483): 211796_s_at
gccatcagaagcagagatctcccacacccaaaaggccacactggtgtgcctggccacaggtttctaccccgaccacgtggagctgagctggtgggtgaatgggaaggaggtgcacagtggggtcagcacagacccgcagcccctcaaggagcagcccgccctcaatgactccagatactgcctgagcagccgcctgagggtctcggccaccttctggcagaacccccgcaaccacttccgctgtcaagtccagttctacgggctctcggagaatgacgagtggacccaggatagggccaaacctgtcacccagatcgtcagcgccgaggcctggggtagagcagactgtggcttcacctccgagtcttaccagcaaggggtcctgtctgccaccatcctctatgagatcttgctagggaaggccaccttgtatgctgtgctggtcagtgccctcgtgctgatggccatggtcaagagaaagga

SEQ ID NO: 117 - DNA, 483 bp, Homo sapiens
  misc_feature (1)..(483): 221724_s_at
tcaagtcctcaggcatcaacacagcctcttctgcagcttccaaggagaggactgcccctctcaaaagtaataccggattccccaagctgctttgtgcctcactgttgatatttttcctgctattggcaatctcattctttattgcttttgtcaagacagcctggagctgttgcccaaagaattggaagtcatttagttccaactgctactttatttctactgaatcagcatcttggcaagacagtgagaaggactgtgctagaatggaggctcacctgctggtgataaacactcaagaagagcaggatttcatcttccagaatctgcaagaagaatctgcttattttgtggggctctcagatccagaaggtcagcgacattggcaatgggttgatcagacaccatacaatgaaagttccacattctggcatccacgtgagcccagtgatcccaatgagcgctgcgttgtgctaaattttcgta

SEQ ID NO: 118 - DNA, 331 bp, Homo sapiens
  misc_feature (1)..(331): 219607_s_at
atcaacacatttagcttggcgttttattcattccatcacccttactgtaactactatggcaactcaaataattgtcatgggactatgtccatcttaatgggtctggatggcatggtgctcctcttaagtgtgctggaattctgcattgctgtgtccctctctgcctttggatgtaaagtgctctgttgtacccctggtggggttgtgttaattctgccatcacattctcacatggcagaaacagcatctcccacaccacttaatgaggtttgaggccacccaaagatcaacagacaaatgctccagaaatctatgctgactgtgacacaag

SEQ ID NO: 119 - DNA, 507 bp, Homo sapiens
  misc_feature (1)..(507): 218802_at
ctgcagccccttgaacaggtgaaagctggaatagaagctcattcggaagccaaaaccagtggactcctgtgggctggattggcactgctgtccattcagggtggggcactggcctggctcacgtggtgggtgtactcctgggatatcatggagccagttacatacttcatcacatttgcaaattctatggttttttttgcatactttatagtcactcgacaggattatacttactcagctgttaagagtaggcaatttcttcagttcttccacaagaaatcaaagcaacagcactttgatgtgcagcaatacaacaagttaaaagaagaccttgctaaggctaaagaatccctgaaacaggcgcgtcattctctctgtttgcaaatgcaagtagaagaactcaatgaaaagaattaatcttacagttttaaatgtcgtcagattttccattatgtattgattttgcaacttaggatgtttttgagtcccatggttcattttgattgt

SEQ ID NO: 120 - DNA, 541 bp, Homo sapiens
  misc_feature (1)..(541): 221671_x_at
caacaccgtgacaattggcctccgggggccactttcggcggagggaccaaggtggagatcaaacgaactgtggctgcaccatctgtcttcatcttcccgccatctgatgagcagttgaaatctggaactgcctctgttgtgtgcctgctgaataacttctatcccagagaggccaaagtacagtggaaggtggataacgccctccaatcgggtaactcccaggagagtgtcacagagcaggacagcaaggacagcacctacagcctcagcagcaccctgacgctgagcaaagcagactacgagaaacacaaagtctacgcctgcgaagtcacccatcagggcctgagctcgcccgtcacaaagagcttcaacaggggagagtgttagagggagaagtgcccccacctgctcctcagttccagcctgaccccctcccatcctttggcctctgaccctttttccacaggggacctacccctattgcggtcctccagctcatctttcacctcacccccctcctcctccttggctttaattatgc

SEQ ID NO: 121 - DNA, 552 bp, Homo sapiens
  misc_feature (1)..(552): 215121_x_at
  misc_feature (155)..(155): n is a, c, g, or t
  misc_feature (190)..(190): n is a, c, g, or t
  misc_feature (269)..(269): n is a, c, g, or t
  misc_feature (270)..(270): n is a, c, g, or t
  misc_feature (272)..(272): n is a, c, g, or t
  misc_feature (279)..(279): n is a, c, g, or t
  misc_feature (285)..(285): n is a, c, g, or t
  misc_feature (286)..(286): n is a, c, g, or t
  misc_feature (369)..(369): n is a, c, g, or t
  misc_feature (378)..(378): n is a, c, g, or t
  misc_feature (389)..(389): n is a, c, g, or t
  misc_feature (396)..(396): n is a, c, g, or t
  misc_feature (398)..(398): n is a, c, g, or t
  misc_feature (403)..(403): n is a, c, g, or t
  misc_feature (410)..(410): n is a, c, g, or t
  misc_feature (411)..(411): n is a, c, g, or t
  misc_feature (412)..(412): n is a, c, g, or t
  misc_feature (413)..(413): n is a, c, g, or t
  misc_feature (414)..(414): n is a, c, g, or t
  misc_feature (415)..(415): n is a, c, g, or t
  misc_feature (416)..(416): n is a, c, g, or t
  misc_feature (417)..(417): n is a, c, g, or t
  misc_feature (418)..(418): n is a, c, g, or t
  misc_feature (420)..(420): n is a, c, g, or t
  misc_feature (421)..(421): n is a, c, g, or t
  misc_feature (422)..(422): n is a, c, g, or t
  misc_feature (423)..(423): n is a, c, g, or t
aagccaacaaggccacactggtgtgtctcataagtgacttctacccgggagccgtgacagtggcctggaaggcagatagcagccccgtcaaggcgggagtggagaccaccacaccctccaaacaaagcaacaacaagtacgcggccagcagctanctgagcctgacgcctgagcagtggaagtcccacanaagctacagctgccaggtcacgcatgaagggagcaccgtggagaagacagtggcccctacagaatgttcataggttctnnanccctcancccccnnccacgggagactagagctgcaggatcccaggggaggggtctctcctcccaccccaaggcatcaagcccttctccctgcactcnataaacccncaataaatatnctcattngntcaancagaaannnnnnnnnannnnattttttttctcacataaattgctagcctccccggggttctcagtgtggggtacagggaattctgcacccagtgtgaaaatcacccaagggagaggctcacagcctccctgagtcatctcaccagaggg

SEQ ID NO: 122 - DNA, 508 bp, Homo sapiens
  misc_feature (1)..(508): 202147_s_at
aacaccgggccaaagtggacaagagaaagcagcggtcagttttcagagatgtcctgagggcagtggaggaacgggattttccaacagaaaccattaaatttggtcctgaacgcatgtatattgattgctgggtaaaaaaacacacctatgacacctttaaggaggttcttggatcagggatgcagtacccacttgcagtcaaaatggaattcctcgaaaatgtatttgaaacttggacccccagtgatgccttgatgctgcaacgccttaaaacgatgaagatttctcgtttcgaaaggcatttatataactctgcagccttcaaagctcgaaccaaagctagaagcaaatgtcgagataagagagcagatgttggagaattcttctagattttcagaacttgaagactattttctaatttctatttttttttctatttcaatgtatttaaactctagacacagtttttatcttggattaacttagataacttttgtagccagtggtt

SEQ ID NO: 123 - DNA, 534 bp, Homo sapiens
  misc_feature (1)..(534): 201739_at
tgctgtgtgaaccgtcgtgtgagtgtggtatgcctgatcacagatggattttgttataagcatcaatgtgacacttgcaggacactacaacgtgggacattgtttgtttcttccatatttggaagataaatttatgtgtagacttttttgtaagatacggttaataactaaaatttattgaaatggtcttgcaatgactcgtattcagatgcctaaagaaagcattgctgctacaaatatttctatttttagaaagggtttttatggaccaatgccccagttgtcagtcagagccgttggtgtttttcattgtttaaaatgtcacctgtaaaatgggcattatttatgtttttttttttgcattcctgataattgtatgtattgtataaagaacgtctgtacattgggttataacactagtatatttaaacttacaggcttatttgtaatgtaaaccaccattttaatgtactgtaattaacatggttataatacgtacaatccttccctcatcccatcacacaactttttttg

SEQ ID NO: 124 - DNA, 477 bp, Homo sapiens
  misc_feature (1)..(477): 208014_x_at
gaaatggaatctcactctgttacccaggctggagtgcaatggccaaatctcggctcactgcaacctctgcctcccgggctcaagcgattctcctgtctcagcctcccaagcagctgggattacgggcacctgccaccacaccccgctaatttttgtattttcattagaggcggggtttcaccatatttgtcaggctggtctcaaactcctgacctcaggtgacccacctgcctcagccttccaaagtgctgggattacaggcgtgagccacctcacccagccggctaatttagataaaaaaatatgtagcaatggggggtcttgctatgttgcccaggctggtctcaaacttctggcttcatgcaatccttccaaatgagccacaacacccagccagtcacattttttaaacagttacatctttattttagtatactagaaagtaatacaataaacatgtcaaacctgcaaattcag

SEQ ID NO: 125 - DNA, 444 bp, Homo sapiens
  misc_feature (1)..(444): 211339_s_at
ggtgttgcaattggctctttctaaatcatgtgacgttttgactggcttgagattcagatgcataatttttaattataattattgtgaagtggagagcctcaagataaaactctgtcattcagaagatgattttactcagcttatccaaaattatctctgtttactttttagaattttgtacattatcttttgggatccttaattagagatgatttctggaacattcagtctagaaagaaaacattggaattgactgatctctgtggtttggtttagaaaattcccctgtgcatggtattacctttttcaagctcagattcatctaatcctcaactgtacatgtgtacattcttcacctcctggtgccctatcccgcaaaatgggcttcctgcctggtttttctcttctcacattttttaaatggtcccctgtgtttgtagagaa

SEQ ID NO: 126 - DNA, 271 bp, Homo sapiens
  misc_feature (1)..(271): 211649_x_at
gtctcctgcaaggcttctggatacaccttcaccgactactatatgcactgggtgcagcaggcccctggacaagggcttgagtggatgggacggatcaaccctaacactggtggcacaaactctgcacagaaatttcagggcagggtcaccatgaccagggacacgtccatcagcacagcctacatggagctcagcaacctgagatctgacgacacggccatgtattcctgtgcgagagggggctattgtactactagcaactgcaatctta

SEQ ID NO: 127 - DNA, 521 bp, Homo sapiens
  misc_feature (1)..(521): 202643_s_at
tctttgggttattactgtctttacttctaaagaagttagcttgaactgaggagtaaaagtgtgtacatatataatatacccttacattatgtatgagggatttttttaaattatattgaaatgctgccctagaagtacaataggaaggctaaataataataacctgttttctggttgttgttggggcatgagcttgtgtatacactgcttgcataaactcaaccagctgcctttttaaagggagctctagtcctttttgtgtaattcactttatttattttattacaaacttcaagattatttaagtgaagatatttcttcagctctggggaaaatgccacagtgttctcctgagagaacatccttgctttgagtcaggctgtgggcaagttcctgaccacagggagtaaattggcctctttgatacacttttgcttgcctccccaggaaagaaggaattgcatccaaggtatacatacatattcatcgatgtttcgtgcttctccttatgaaactccagc

SEQ ID NO: 128 - DNA, 503 bp, Homo sapiens
  misc_feature (1)..(503): 218829_s_at
taccatacatatcatacttgctcatttgtttccctttttgactgtatgggggttcccacactcgtgcatacacacacatccatacactctgacaatctccacgctagtgtgaacgcctctgtcccgaggcgcagcaataataaggcagctgttgaatgtgaagggtccctttggaaaattaacctactgggagggttcttgccagacagaactacagttccattgtctcgtggtcttgtaatgcactggtaaaaacaaaataaatagatgaataaataaagagtgagagaagagagaatcaggtaccttttttaaattaaaggactttgttactttagccacaaagctaaaacagcattacctcagctctaaactagccttgaagtttacagacatgactttgtaaatgtattgtttttctttgttgtgatgtccttttatttttttctctgaaaactgctatcatgtaagataaaatgtaaattgctgccaactgtagtaat

SEQ ID NO: 129 - DNA, 433 bp, Homo sapiens
  misc_feature (1)..(433): 204072_s_at
ggagctgctatgaagtacctttcttatgttgctaggctactgtttctgaaagccctggatctctttgcaccaaaaatggtccagatagactctttttaaggatcttggctgctttttactagaaggttgcttttatgagcatatttatactgctgaaggatgagtgttaattttaattaactttgccgttttgtagagaaaactattcacaagataaattccaagtcttttcacctgtcaggcatgcatattttaatatctgtttggatagtcagaagtagaatcataaaggtaaaatatgagttgttactttgtttcttcgatgtcatattttatgtgtaatatatatgtaaagggccattcttaagttctctccttaaacttaatgctgtcaagtgttagatgtgtgcatgtgaacttgttgcactgcaga

SEQ ID NO: 130 - DNA, 525 bp, Homo sapiens
  misc_feature (1)..(525): 211824_x_at
atatgggctgtcgttacactgtgtctgggtctggttcagggatgctggaaatactccccaaggaactggagctctgctatcgaagccctggagaagaccagctgttctcggagttctacgttggccacttgggatcagggatcaggctgcaagtgaaagacaagaaagatgagactctggtgtgggaggccttggtgaaaccaggagatctcatgcctgcaactactctgatccctccagcccgcatagccgtaccttcacctctggatgccccgcagttgctgcactttgtggaccagtatcgagagcagctgatagcccgagtgacatcggtggaggttgtcttggacaaactgcatggacaggtgctgagccaggagcagtacgagagggtgctggctgagaacacgaggcccagccagatgcggaagctgttcagcttgagccagtcctgggaccggaagtgcaaagatggactctaccaagccctgaaggagacccatcctcacctcattatggaactct

SEQ ID NO: 131 - DNA, 547 bp, Homo sapiens
  misc_feature (1)..(547): 209824_s_at
gaccaaggatcaagtagtcccagtaatgatgaggcagcaatggctgtcatcatgagcctcttggaagcagatgctggactgggtggccctgttgactttagtgacttgccatggccgctgtaaacactacatgttgctttggcaacagctatagtatcaaagtgcattactggtggagttttacagtctgtgaagcttactggataaggagagaatagcttttatgtactgacttcataaaagccatctcagagccattgatacaagtcaatcttactatatgtaacttcagacaaagtggaactaagcctgctccagtgtttcctcatcattgattattgggccagctgtggatagcttgcattaattgtatattttggattctgtttgtgttgaattttttaatcattgtgcacagaagcatcattggtagcttttatatgcaaatggtcatttcagatgtatggtgtttttacactacaaagaagtcccccatgtggatatttcttatactaattgtatcataaagccgtttattcttccttgt

SEQ ID NO: 132 - DNA, 419 bp, Homo sapiens
  misc_feature (1)..(419): 213539_at
gggaacactgctctcagacattacaagactggacctgggaaaacgcatcctggacccacgaggaatatataggtgtaatgggacagatatatacaaggacaaagaatctaccgtgcaagttcattatcgaatgtgccagagctgtgtggagctggatccagccaccgtggctggcatcattgtcactgatgtcattgccactctgctccttgctttgggagtcttctgctttgctggacatgagactggaaggctgtctggggctgccgacacacaagctctgttgaggaatgaccaggtctatcagcccctccgagatcgagatgatgctcagtacagccaccttggaggaaactgggctcggaacaagtgaacctgagactggtggcttctagaagcagccattaccaactgtacct

SEQ ID NO: 133 - DNA, 333 bp, Homo sapiens
  misc_feature (1)..(333): 217143_s_at
gaaggtgaacatgatgtccctcacagtgcttgggctacgaatgctgtttgcaaagactgttgccgtcaattttctcttgactgccaagttatttttcttgtaaggctgactggcatgaggaagctacactcctgaagaaaccaaaggcttacaaaaatgcatctccttggcttctgacttctttgtgattcaagttgacctgtcatagccttgttaaaatggctgctagccaaaccactttttcttcaaagacaacaaacccagctcatcctccagcttgatgggaagacaaaagtcctggggaaggggggtttatgtcctaactgctttgta

SEQ ID NO: 134 - DNA, 507 bp, Homo sapiens
  misc_feature (1)..(507): 204479_at
aaggcacctccaaaggcaggactggactaattccaagcaactatgtggctgagcaggcagaatccattgacaatccattgcatgaagcagcaaaaagaggcaacttgagctggttgagagagtgtttggacaacagagtgggtgttaatggcttagacaaagctggaagcactgccttatactgggcttgccacgggggccacaaagatatagtggaaatgctatttactcaaccaaatattgaactgaaccagcagaacaagttgggagatacagctttcgatgctgctgcctggaagggttatgcagatatcgtccagttgcttctggcaaaaggtgctagaacagacttaagaaacattgagaagaagctggccttcgacatggctaccaatgctgcctgtgcatctctcctgaaaaagaaacagggaacagatgcagttcgaacattaagcaatgccgaggactatctcgatgatgaagactcagattaattcctttctggag

SEQ ID NO: 135 - DNA, 532 bp, Homo sapiens
  misc_feature (1)..(532): 200628_s_at
ggacgtgtctttcatgtacctgaccttcttcctcgaggacgacgacaagctcgagcagatcaggaaggattacaccagcggagccatgctcaccggtgagctcaagaaggcactcatagaggttctgcagcccttgatcgcagagcaccaggcccggcgcaaggaggtcacggatgagatagtgaaagagttcatgactccccggaagctgtccttcgactttcagtagcactcgttttacatatgcttataaaagaagtgatgtatcagtaatgtatcaataatcccagcccagtcaaagcaccgccacctgtaggcttctgtctcatggtaattactgggcctggcctctgtaagcctgtgtatgttatcaatactgtttcttcctgtgagttccattatttctatctcttatgggcaaagcattgtgggtaattggtgctggctaacattgcatggtcggatagagaagtccagctgtgagtctctccccaaagcagccccacagtggagccttcggctggaagtccat

SEQ ID NO: 136 - DNA, 523 bp, Homo sapiens
  misc_feature (1)..(523): 201694_s_at
gtaaatactgcttgaccgtactctcacatgtggcaaaatatggtttggtttttcttttttttttttgaaagtgttttttcttcgtccttttggtttaaaaagtttcacgtcttggtgccttttgtgtgatgccccttgctgatggcttgacatgtgcaattgtgagggacatgctcacctctagccttaaggggggcagggagtgatgatttgggggaggctttgggagcaaaataaggaagagggctgagctgagcttcggttctccagaatgtaagaaaacaaaatctaaaacaaaatctgaactctcaaaagtctatttttttaactgaaaatgtaaatttataaatatattcaggagttggaatgttgtagttacctactgagtaggcggcgatttttgtatgttatgaacatgcagttcattattttgtggttctattttactttgtacttgtgtttgcttaaacaaagtgactgtttggcttataaacacattgaatgcgctttattgcccatggga

SEQ ID NO: 137 - DNA, 460 bp, Homo sapiens
  misc_feature (1)..(460): 205821_at
aggcaattcagatatccccaaggctgcctctcccaccacaagcccagagtggatgggctgggggaggggtgctgttttaatttctaaaggtaggaccaacacccaggggatcagtgaaggaagagaaggccagcagatcagtgagagtgcaaccccaccctccacaggaaattgcctcatgggcagggccacagcagagagacacagcatgggcagtgccttccctgcctgtgggggtcatgctgccacttttaatgggtcctccacccaacggggtcagggaggtggtgctgccccagtgggccatgattatcttaaaggcattattctccagccttaagatcttaggacgtttcctttgctatgatttgtacttgcttgagtcccatgactgtttctcttcctctctttcttccttttggaatagtaatatccatcctatgtttgtcccactattgta

SEQ ID NO: 138 - DNA, 417 bp, Homo sapiens
  misc_feature (1)..(417): 209138_x_at
tctctgggctccaggctgaggacgaggctgattattactgctgctcatatgcaggtagttacactgtggttttcggcggagggaccaaactgaccgtcctaggtcagcccaaggctgccccctcggtcactctgttcccgccctcctctgaggagcttcaagccaacaaggccacactggtgtgtctcataagtgacttctacccgggagccgtgacagtggcctggaaggcagatagcagccccgtcaaggcgggagtggagaccaccacaccctccaaacaaagcaacaacaagtacgcggccagcagctatctgagcctgacgcctgagcagtggaagtcccacagaagctacagctgccaggtcacgcatgaagggagcaccgtggagaagacagtggcccctacagaatgtt

SEQ ID NO: 139 - DNA, 436 bp, Homo sapiens
  misc_feature (1)..(436): 215242_at
ctcctggctgacatcagaggtcacaagatgagttcctcatttgtccaaatgacattcagctgctaaaagaagtcagacttttagagggctgttgaaaagacagtaagtcaggaggttttcagtacatgactgcaggggaatcagacacaggctagtcacttaagttgcttaattgtccgtgtacccttagcccacgacttcagggctcagcagcttcatccttcatggcaccaaaccttgacgtaagggattcaaagacacactcataagaatcgtgaatttgtcctcatgcaaaatttgggggactggctacaaaaccgaaacaaggagatcgtatccctaagtgaaagggactttatattaattgtcagttataacaatatgtaaaatacataaaagagatagagcactgcaggccatcaaggtcaaacatttg

SEQ ID NO: 140 - DNA, 501 bp, Homo sapiens
  misc_feature (1)..(501): 211656_x_at
ggaccttccagatcctggtgatgctggaaatgactccccagcgtggagacgtctacacctgccacgtggagcaccccagcctccagaaccccatcatcgtggagtggcgggctcagtctgaatctgcccagagcaagatgctgagtggcattggaggcttcgtgctggggctgatcttcctcgggctgggccttattatccatcacaggagtcagaaagggctcctgcactgactcctgagactattttaactgggattggttatcacttttctgtaacgcctgcttgtccctgcccagaattcccagctgcctgtgtcagcctgtccccctgagatcagagtcctacagtggctgtcacgcagccaccaggtcatctcctttcatccccacctcgaggctgatggctgtgaccctgcttcctgcacttacccagagcctctgcctgtgcacggccagctgcgtctactgaggccccaaggggtttctgtttctattctct

SEQ ID NO: 141 - DNA, 521 bp, Homo sapiens
  misc_feature (1)..(521): 222221_x_at
tcccctgtcaacggcaagatcacgggcgccaacgccaagaaggagatggtgaagtccaagctccccaacaccgtgctagggaagatctggaagctggccgacgtggacaaggacgggctgctggacgacgaggagttcgcgctggccaaccacctcatcaaggtcaagctggagggccacgagctgcccgccgacctgcccccgcacctggtgccgccctcctctgcctggggccattgagcccagcctccagggcccgggtgcgtttgcaggccagtggccactgtccgggctgtgatggcaccaaggcaggtggagcaccaggtaccacacagctgggcttcccaccaggctttcccgcgggggtctcagggagcttctccccagcgctgctcggagtctgcaggaactggccttgttctccttagcccgtcactccatacagtattaggtgaggatggatgcgggcgctgtccttgccgggaagtcactgttgaagttgcagtggcttgttcacacct

SEQ ID NO: 142 - DNA, 539 bp, Homo sapiens
  misc_feature (1)..(539): 208488_s_at
gaggacacgtatctctatatcttcctgggatgacaatcagctacatttgtgaccccggctacctgttagtgggaaagggcttcattttctgtacagaccagggaatctggagccaattggatcattattgcaaagaagtaaattgtagcttcccactgtttatgaatggaatctcgaaggagttagaaatgaaaaaagtatatcactatggagattatgtgactttgaagtgtgaagatgggtatactctggaaggcagtccctggagccagtgccaggcggatgacagatgggaccctcctctggccaaatgtacctctcgtgcacatgatgctctcatagttggcactttatctggtacgatcttctttattttactcatcattttcctctcttggataattctaaagcacagaaaaggcaataatgcacatgaaaaccctaaagaagtggctatccatttacattctcaaggaggcagcagcgttcatccccgaactctgcaaacaaatgaagaaaatagcagggtccttccttga

SEQ ID NO: 143 - DNA, 543 bp, Homo sapiens
  misc_feature (1)..(543): 202437_s_at
gaatgtatttgctgacaaccattaaagtcagaagttttactccaggttattgcaataaagtataatgtttattaaatgcttcatttgtatgtcaaagctttgactctataagcaaattgcttttttccaaaacaaaaagatgtctcaggtttgttttgtgaattttctaaaagctttcatgtcccagaacttagcctttacctgtgaagtgttactacagccttaatattttcctagtagatctatattagatcaaatagttgcatagcagtatatgttaatttgtgtgtttttagctgtgacacaactgtgtgattaaaaggtatactttagtagacatttataactcaaggataccttcttatttaatcttttcttatttttgtactttatcatgaatgcttttagtgtgtgcataatagctacagtgcatagttgtagacaaagtacattctggggaaacaacatttatatgtagcctttactgtttgatataccaaattaaaaaaaaattgtatctcattacttatactgggacaccat

SEQ ID NO: 144 - DNA, 390 bp, Homo sapiens
  misc_feature (1)..(390): 212286_at
gtctcatgttttattggaccaaagttgtggtttgtatggagtgtagtagtagtgtgtacaggtagaaaacttttaaatacagcatgcaggtgtttcagttagcttgttttcatcaccataactgcaaagatgtggcttagttgtattgcatgcttcctataatttaactctccataattgatgcctgcagtagtgtaaggcatttcatactagtctcctctagtagacctgtgacttactgtgttggacatattatttagacttagtcatacaaagaaacttagctcttttttcatctcacagtaaagcctatttccccaggaaaaaaataaatgcctttgaatgaaaattctgaaattgtaaatgtctattttaatattcacctatgaa

SEQ ID NO: 145 - DNA, 515 bp, Homo sapiens
  misc_feature (1)..(515): 204959_at
gaggtcccaaacagaattatcgaaatagcaaataaaactcccaagatcagtcaactttacaagcaagcatctggaacaatggtgtatgggttgtttatgttacaaaagaaaagcgtacacaagaagaacacaatttatgaaatacaggataatacaggatccatggatgtagtggggagtggaaaatggcacaatatcaagtgtgagaaaggagataaacttcgactcttctgccttcaactgagaacagttgaccgcaagctgaaactggtgtgtggaagtcacagcttcatcaaggtcatcaaggccaagaaaaacaaggaaggaccaatgaatgttaattgaaatatgaaagctgaaatgcaacaaacaacttccgcttaaaacaattaagttgttaataactgtgattttgtaaatttcagtaattcatttaaatgatgtttcagtagatatattctagcatattaagagcttttataactgagttatagattagtttgctttctggaata

SEQ ID NO: 146 - DNA, 522 bp, Homo sapiens
  misc_feature (1)..(522): 221651_x_at
gttatcctgtcacttttggccaggggaccaagctggagatcaaacgaactgtggctgcaccatctgtcttcatcttcccgccatctgatgagcagttgaaatctggaactgcctctgttgtgtgcctgctgaataacttctatcccagagaggccaaagtacagtggaaggtggataacgccctccaatcgggtaactcccaggagagtgtcacagagcaggacagcaaggacagcacctacagcctcagcagcaccctgacgctgagcaaagcagactacgagaaacacaaagtctacgcctgcgaagtcacccatcagggcctgagctcgcccgtcacaaagagcttcaacaggggagagtgttagagggagaagtgcccccacctgctcctcagttccagcctgaccccctcccatcctttggcctctgaccctttttccacaggggacctacccctattgcggtcctccagctcatctttcacctcacccccctcctcctccttggctttaattatgc

SEQ ID NO: 147 - DNA, 398 bp, Homo sapiens
  misc_feature (1)..(398): 201236_s_at
ccctttcctggatttctaaactgctcaattttgactcaaaggtgctatttaccaaacactctccctacccattcctgccagctctgcctccttttcaactctccacattttgtattgccttcccagacctgcttccagtctttattgctttaaagttcactttgggcccacagacccaagagctaattttctggtttgtgggttgaaacaaagctgtgaatcactgcaggctgtgttcttgcatcttgtctgcaaacaggtccctgcctttttagaagcagcctcatggtctcatgcttaatcttgtctctcttctcttctttatgatgttcactttaaaaacaacaaaacccctgagctggactgttgagcaggcctgtctctcctattaagtaaaa

SEQ ID NO: 148 - DNA, 251 bp, Homo sapiens
  misc_feature (1)..(251): 211005_at
tgcctgtgtgcgagtctgagtcagagatttggagatgtctctgtgtgtttgtgtgtatctgtgggtctccatcctccatgggggctcagccaggtgctgtgacaccccccttctgaatgaagccttctgacctgggctggcactgctgggggtgaggacacattgccccatgagacagtcccagaacacggcagctgctggctgtgacaatggtttcaccatccttagaccaagggatgggacctgatgac

SEQ ID NO: 149 - DNA, 436 bp, Homo sapiens
  misc_feature (1)..(436): 208078_s_at
agactgggcgaaaggctgtccggagggcagaccaggtgccttgccgcagagaaaacaccaaagtctcctgttcgctcataaagaagtttttgggatgggagagaatccagaccatcttggggcagccaggcccttgccttcatttttacagaggtagcacaactgattccaacacaaaaccccttcccctttttaaaatgatttctgttctaatgccatagatcaaaggcctcagaaaccattgtgtgtttcctctttgaagcaatgacaagcactttactttcacggtggtttttgttttttcttattgctgtggaacctcttttggaggacgttaaaggcgtgttttacttgtttttttaagagtgtgtgatgtgtgttttgtagatttcttgacagtgctgtaatacagacggcaatgcaatagcctatttaa

SEQ ID NO: 150 - DNA, 473 bp, Homo sapiens
  misc_feature (1)..(473): 210018_x_at
tggtccttaccagagttctgcagccacctcaggaggagcagggcattatcactcattgcaagacccattccatggtgtttaccattcacatcctggtaatccaagtaatgttacaccagcagatagctgtcattgcagccggactccagatgcatttatttcaagtttcgctcaccatgcttcatgtcattttagtagaagtaatgtgccagtagagacaactgatgaaataccatttagtttctctgacaggctcagaatttctgaaaaatgacctccttgtttttgaaagttagcataattttagatgcctgtgaaatagtactgcacttacataaagtgagacattctgaaaaggcaaatttgtatatgtagagaaagaatagtagtaactgtttcatagcaaacttcaggactttgagatgttgaaattacattatttaattacagacttcctctttctaagattttgt

SEQ ID NO: 151 - DNA, 252 bp, Homo sapiens
  misc_feature (1)..(252): 209273_s_at
actcttctggccgtaggttccaggaaagctcgtggaagctttggggctcactgcagaaatcatgtgactgtcacgtgctggaaaataaagtgatacatcttgaaaatgaatccagtgtgttggattccagaagaaatgatatttatattctctataggggacagaaaatgagaagccatcactctttttggatcatttaggtctcttgtatcctttgttttagaaccagtttcattaaagttgccttcctgg

SEQ ID NO: 152 - DNA, 557 bp, Homo sapiens
  misc_feature (1)..(557): 213624_at
  misc_feature (464)..(464): n is a, c, g, or t
gggagagtccatctggaagctggagtatatcctgacccagacctacgacattgaagatttgcagccggaaagtttatatggattagctaaacaatttacaatcctagacagtaagcagtttataaaatactacaattacttctttgtgagttatgacagcagtgtaacatgtgataagacatgtaaggcctttcagatttgtgcaattatgaatcttgataatatttcctatgcagattgcctcaaacagctttatataaagcacaattactagtatttcacagtttttgctaatagaaaatgctgattctgattctgagatcaatttgtgggaattttacataaatctttgttaattactgagtgggcaagtagacttcctgtctttgctttctttttttttttctttttgatgccttaatgtagatatctttatcattctgaattgtattatatatttaaantgctcattaatagaatgatggatgtaaattggatgtaaatattcagtttatataattatatctaatttgtacccttgttgaaattgtcattta

SEQ ID NO: 153 - DNA, 517 bp, Homo sapiens
  misc_feature (1)..(517): 208075_s_at
gagagctacagaaggaccaccagtagccactgtccccgggaagctgtaatcttcaagaccaaactggacaaggagatctgtgctgaccccacacagaagtgggtccaggactttatgaagcacctggacaagaaaacccaaactccaaagctttgaacattcatgactgaactaaaaacaagccatgacttgagaaacaaataatttgtataccctgtcctttctcagagtggttctgagattattttaatctaattctaaggaatatgagctttatgtaataatgtgaatcatggtttttcttagtagattttaaaagttattaatattttaatttaatcttccatggattttggtgggttttgaacataaagccttggatgtatatgtcatctcagtgctgtaaaaactgtgggatgctcctcccttctctacctcatgggggtattgtataagtccttgcaagaatcagtgcaaagatttgctttaattgttaagatatgatgtccctatggaa

SEQ ID NO: 154 - DNA, 473 bp, Homo sapiens
  misc_feature (1)..(473): 212154_at
  misc_feature (33)..(33): n is a, c, g, or t
ctgcgtctggctcgggagctgatgaggatgtangagagtccagagctgacaacatctcgaccacttccaaagatactgttgactagtgctgctccaaaagtggaaaccacgacgctgaatatacagaacaagatacctgctcagacaaagtcacctgaagaaactgataaagagaaagttcacctctctgactcagaaaggaaaatggacccagccgaagaggatacaaatgtgtatactgagaaacactcagacagtctgtttaaacggacagaagtcctagcagctgtcattgctggtggagttattggctttctctttgcaatttttcttatcctgctgttggtgtatcgcatgagaaagaaggatgaaggaagctatgaccttggagaacgcaaaccatccagtgctgcttatcagaaggcacctactaaggagttttatgcgtaaaactccaacttagtgtctctatt

SEQ ID NO: 155 - DNA, 46 bp, Homo sapiens
  misc_feature (1)..(46): 1405_i_at
agcttccccaactaaagcctagaagagcttctgaggcgctgctttg

SEQ ID NO: 156 - DNA, 531 bp, Homo sapiens
  misc_feature (1)..(531): 200604_s_at
agtgggaacgtcttacggtagctgatgcattggaaccagtgcagtttgaagatgggcagaagattgtggtgcagggagaaccaggggatgagttcttcattattttagaggggtcagctgctgtgctacaacgtcggtcagaaaatgaagagtttgttgaagtgggaagattggggccttctgattattttggtgaaattgcactactgatgaatcgtcctcgtgctgccacagttgttgctcgtggccccttgaagtgcgttaagctggaccgacctagatttgaacgtgttcttggcccatgctcagacatcctcaaacgaaacatccagcagtacaacagttttgtgtcactgtctgtctgaaatctgcctcctgtgcctcccttttctcctctccccaatccatgcttcactcatgcaaactgctttattttccctacttgcagcgccaagtggccactggcatcgcagcttcctgtctgtttatatattaaagttgcttttattgcaccattttcaatttggagca

SEQ ID NO: 157 - DNA, 462 bp, Homo sapiens
  misc_feature (1)..(462): 200615_s_at
gggcaggacatgctgtaccaatccctgaagctcactaatggcatttggattttggccgaactacgtatccagccaggaaaccccaattacacgctgtcactgaagtgtagagctcctgaagtctctcaatacatctatcaggtctacgacagcattttgaaaaactaacaagactggtccagtacccttcaaccatgctgtgatcggtgcaagtcaagaactcttaactggaagaaattgtattgctgcgtagaatctgaacacactgaggccacctagcaaggtagtaactagtctaacctgtgctaacattagggcacaacctgttggatagttttagcttcctgtgaacatttgtaaccactgcttcagtcacctcccacctcttgccacctgctgctgctatctgtccttacttgtgggcttctccatgctgtgccaatggctggctttttctacacc

SEQ ID NO: 158 - DNA, 396 bp, Homo sapiens
  misc_feature (1)..(396): 200648_s_at
gccattgagaaactaagcaagcggcaccagtaccacatccgtgcctatgatcccaagggaggcctggacaatgcccgacgtctaactggattccatgaaacctccaacatcaacgacttttctggtggtgtagccaatcgtagcgccagcatacgcattccccggactgttggccaggagaagaagggttactttgaagatcgtcgcccctctgccaactgcgaccccttttcggtgacagaagccctcatccgcacgtgtcttctcaatgaaaccggcgatgagcccttccagtacaaaaattaagtggactagacctccagctgttgagcccctcctagttcttcatcccactccaactcttccccctctcccagttgtcccgattgtaactca

SEQ ID NO: 159 - DNA, 448 bp, Homo sapiens
  misc_feature (1)..(448): 200658_s_at
  misc_feature (144)..(144): n is a, c, g, or t
  misc_feature (155)..(155): n is a, c, g, or t
  misc_feature (160)..(160): n is a, c, g, or t
  misc_feature (164)..(164): n is a, c, g, or t
  misc_feature (167)..(167): n is a, c, g, or t
  misc_feature (214)..(214): n is a, c, g, or t
  misc_feature (222)..(222): n is a, c, g, or t
gcaggtgagcgacgaccttacagagcgagccgccacctttgggctcatcctggatgacgtgtccttgacacatctgaccttcgggaaggagttcacagaagcggtggaagccaaacaggtggctcagcaggaagcagagagggnccagatttgtnggtgngaanaanggctgagcaacagaaaaaggcggccatcatctctgctgagggcgacntccaaggncagctgagctgattgccaactcactggccactgcaggggatggcctgatcgagctgcgcaagctggaagctgcagaggacatcgcgtaccagctctcacgctctcggaacatcacctacctgccagcggggcagtccgtgctcctccagctgccccagtgagggcccaccctgcctgcacctccgcgggctgactgggccacagccccgatgattcttaacacagc

SEQ ID NO: 160 - DNA, 358 bp, Homo sapiens
  misc_feature (1)..(358): 200696_s_at
tgcttctggacacctgggaccaggtctttgtctgggttggaaaggattctcaagaagaagaaaagacagaagccttgacttctgctaagcggtacatcgagacggacccagccaatcgggatcggcggacgcccatcaccgtggtgaagcaaggctttgagcctccctcctttgtgggctggttccttggctgggatgatgattactggtctgtggaccccttggacagggccatggctgagctggctgcctgaggaggggcagggcccacccatgtcaccggtcagtgccttttggaactgtccttccctcaaagaggccttagagcgagcagagcagctctgctatgagtgtgtgt

SEQ ID NO: 161 - DNA, 503 bp, Homo sapiens
  misc_feature (1)..(503): 200703_at
gtaaccatgtgcgaccgaaaggccgtgatcaaaaatgcggacatgtcggaagagatgcaacaggactcggtggagtgcgctactcaggcgctggagaaatacaacatagagaaggacattgcggctcatatcaagaaggaatttgacaagaagtacaatcccacctggcattgcatcgtggggaggaacttcggtagttatgtgacacatgaaaccaaacacttcatctacttctacctgggccaagtggccattcttctgttcaaatctggttaaaagcatggactgtgccacacacccagtgatccatccagaaacaaggactgcagcctaaattccaaataccagagactgaaattttcagccttgctaagggaacatctcgatgtttgaacctttgttgtgttttgtacagggcattctctgtactagtttgtcgtggttataaaacaattagcagaatagcctacatttgtatttattttctattccatacttctgcc

SEQ ID NO: 162 - DNA, 439 bp, Homo sapiens
  misc_feature (1)..(439): 200727_s_at
  misc_feature (268)..(268): n is a, c, g, or t
  misc_feature (269)..(269): n is a, c, g, or t
  misc_feature (325)..(325): n is a, c, g, or t
gggtggtgcagttctagcggatatcatgaaagacaaagacaacttttggatgacccgacaagagtaccaagaaaagggtgtccgtgtgctagagaaacttggtgtgactgttcgataaactccaaagcttgttcccatcatacccgtaatgctttcttttttcctttattgccaatctttgaactcattcaactccaggacatggaagaggcctctctctgccctttgactggaaaggtcaagttttattctggtgtcttggggaagnnttgttaaatttttgttaatgtgggtaaatctgagtttaattcaactgcttccctanatagactagagggctaaggattctgtctgctgctttgtttcttctaagtaggcatttagatcattcctgtaggcttcctattttcactttactgctctaatgctgctagtcgta

SEQ ID NO: 163 - DNA, 312 bp, Homo sapiens
  misc_feature (1)..(312): 200728_at
  misc_feature (106)..(106): n is a, c, g, or t
gaacagataagtttgcctgcatgctggacatgcctcagaaccatgaatagcccgtactagatcttgggaacatggatcttagagtcactttggaataagttcttanataaatacccccagccttttgagaacggggcttgttaaaggacgcgtatgtagggcccgtacctactggcagttgggttcagggaaatgggattgacttggccttcaggctcctttggtcataattttaaaatatgggagtagaaaacaacaaagaatggaatggactcttaaaacaatgaaagagcatttatcgtttgtcccttg

SEQ ID NO: 164 - DNA, 507 bp, Homo sapiens
  misc_feature (1)..(507): 200729_s_at
gagcttaagatctggtgttttgttaatgcttctgtttattccagaagcattaaggtaacccattgccaagtatcattcttgcaaattattcttttatataactgaccagtgcttaataaaacaagcaggtacttacaaataattactggcagtaggttataattggtggtttaaaaataacattggaatacaggacttgttgccaattgggtaattttcattagttgttttgtttgttttgatttgaaacctggaaatacagtaaaatttgactgtttaaaatgttggccaaaaaaatcaagatttaatttttttatttgtactgaaaaactaatcataactgttaattctcagccatctttgaagcttgaaagaagagtctttggtattttgtaaacgttagcagactttcctgccagtgtcagaaaatcctatttatgaatcctgtcggtattccttggtatctgaaaaaaataccaaatagtaccatacatgagttatttctaa

SEQ ID NO: 165 - DNA, 460 bp, Homo sapiens
  misc_feature (1)..(460): 200769_s_at
cagttgtgcctgcgaaataccttgatgaggatacaatctaccacctacagccaagtggcagatttgttattggtgggcctcagggtgatgctggtttgactggacggaaaatcattgtggacacttatggcggttggggtgctcatggaggaggtgccttttcaggaaaggattataccaaggtcgaccgttcagctgcttatgctgctcgttgggtggcaaaatcccttgttaaaggaggtctgtgccggagggttcttgttcaggtctcttatgctattggagtttctcatccattatctatctccattttccattatggtacctctcagaagagtgagagagagctattagagattgtgaagaagaatttcgatctccgccctggggtcattgtcagggatctggatctgaagaagccaatttatcagaggactgcagcctatggccactttggtag

SEQ ID NO: 166 - DNA, 514 bp, Homo sapiens
  misc_feature (1)..(514): 200788_s_at
taaattcacatgcagtctcagagactatttagacaaagttcaagttaggagcttttaggatgtgggagtaaaactttaatgggaggggagggctggctgctggaagaaggaagaagccagactggttagacagtactcttaactcctagcccagcctacgtgccctgcccctctggccactgctgcagacacctgccttaacacacacacctctaggactccacagttttgccttaaaggaccttcccaagtctccctttccctgtctggcttctcccttaagaagagagagatacttgtagaattgggtggggggaatgagcatgaactgtccttccatttgggatatgttacattagagtgagagagagaataaggagcctttcttatggaagaaatgggagaagagagacagggttcttttcagcagagtctagtagtttctctgtaaggcaaaataatctaaaaagactaacctgcccacccactccttatattgctgtgagattgcccc

SEQ ID NO: 167 - DNA, 541 bp, Homo sapiens
  misc_feature (1)..(541): 200802_at
taattgcacggattaccaggctcgccggcttcgaatccgatatgggcaaaccaagaagatgatggacaaggtggagtttgtccatatgctcaatgctaccatgtgcgccactacccgtaccatctgcgccatcctggagaactaccagacagagaagggcatcactgtgcctgagaaattgaaggagttcatgccgccaggactgcaagaactgatcccctttgtgaagcctgcgcccattgagcaggagccatcaaagaagcagaagaagcaacatgagggcagcaaaaagaaagcagcagcaagagacgtcaccctagaaaacaggctgcagaacatggaggtcaccgatgcttgaacattcctgcctccctatttgccaggctttcatttctgtctgctgagatctcagagcctgcccaacagcagggaagccaagcacccattcatccccctgcccccatctgactgcgtagctgagaggggaacagtgccatgtaccacacagatgttcctgtctcctcgcatgggcatagggacc

SEQ ID NO: 168 - DNA, 417 bp, Homo sapiens
  misc_feature (1)..(417): 200806_s_at
ttgatcgaggctatatttctccatactttattaatacatcaaaaggtcagaaatgtgaattccaggatgcctatgttctgttgagtgaaaagaaaatttctagtatccagtccattgtacctgctcttgaaattgccaatgctcaccgtaagcctttggtcataatcgctgaagatgttgatggagaagctctaagtacactcgtcttgaataggctaaaggttggtcttcaggttgtggcagtcaaggctccagggtttggtgacaatagaaagaaccagcttaaagatatggctattgctactggtggtgcagtgtttggagaagagggattgaccctgaatcttgaagacgttcagcctcatgacttaggaaaagttggagaggtcattgtgaccaaagacgatgccatgctct

SEQ ID NO: 169 - DNA, 493 bp, Homo sapiens
  misc_feature (1)..(493): 200812_at
aactctccaagtacctgcgggattactcaaggactattccaggaaaacagcagctgttgattggggcttatgccaaggccttggagattatcccacgccagctgtgtgacaatgctggctttgatgccacaaacattctcaacaagctgcgggctcggcatgcccaggggggtacatggtatggagtagacatcaacaacgaggacattgctgacaactttgaagctttcgtgtgggagccagctatggtgcggatcaatgcgctgacagcagcctctgaggctgcgtgcctgatcgtgtctgtagatgaaaccatcaagaacccccgctcgactgtggatgctcccacagcagcaggccggggccgtggtcgtggccgcccccactgagaggcaccccacccatcacatggctggctggctgctgggtgcacttaccctccttggcttggttacttcattttacaaggaaggggtagtaattggcccactct

SEQ ID NO: 170 - DNA, 462 bp, Homo sapiens
  misc_feature (1)..(462): 200821_at
gaatgtaggccttaactatttcacatgagtcaaaacaaagcagctttaaaaaaataattggaagcacaatgcatggcactgactgaatgctgttaatatttctaaaagtttctacattcagattatatgcctgattcatagtaaaatacctctaataaacactgttttatagaaaacctgacttcagtgaatatttttgtattttacatgggccagtttatatactgctatttacactattatttcctatagctacatgttctttgtaccttttgtagttttatttgtattactagattcataccttgatggtaacgctctatctggttttgggtgtttttcatgttttagcatttgtataaagaaactggtccatgtaaatactttccatgttttttcttcaaatgtttaaaccactagttgatgtatggtatctttagatatttgcctgtctgtttgctc

SEQ ID NO: 171 - DNA, 539 bp, Homo sapiens
  misc_feature (1)..(539): 200822_x_at
tatggaggctctgtgactggggcaacctgcaaggagctggccagccagcctgatgtggatggcttccttgtgggtggtgcttccctcaagcccgaattcgtggacatcatcaatgccaaacaatgagccccatccatcttccctacccttcctgccaagccagggactaagcagcccagaagcccagtaactgccctttccctgcatatgcttctgatggtgtcatctgctccttcctgtggcctcatccaaactgtatcttcctttactgtttatatcttcaccctgtaatggttgggaccaggccaatcccttctccacttactataatggttggaactaaacgtcaccaaggtggcttctccttggctgagagatggaaggcgtggtgggatttgctcctgggttccctaggccctagtgagggcagaagagaaaccatcctctcccttcttacaccgtgaggccaagatcccctcagaaggcaggagtgctgccctctcccatggtgcccgtgcctctgtgctgtgtatgtgaac

SEQ ID NO: 172 - DNA, 431 bp, Homo sapiens
  misc_feature (1)..(431): 200824_at
aggagggctcactcaaagcctcctgcctatacgggcagctccccaagttccaggacggagacctcaccctgtaccagtccaataccatcctgcgtcacctgggccgcacccttgggctctatgggaaggaccagcaggaggcagccctggtggacatggtgaatgacggcgtggaggacctccgctgcaaatacatctccctcatctacaccaactatgaggcgggcaaggatgactatgtgaaggcactgcccgggcaactgaagccttttgagaccctgctgtcccagaaccagggaggcaagaccttcattgtgggagaccagatctccttcgctgactacaacctgctggacttgctgctgatccatgaggtcctagcccctggctgcctggatgcgttccccctgctctcagcatatgtggggcgc

SEQ ID NO: 173 - DNA, 456 bp, Homo sapiens
  misc_feature (1)..(456): 200860_s_at
acttcagttgcaccatgctgtacctttttgcagaggccaatacggaagccatccaagaacagatcacaagagttctcttggaacggttgattgtaaataggccacatccttggggtcttcttattaccttcattgagctgattaaaaacccagcgtttaagttctggaaccatgaatttgtacactgtgccccagaaatcgaaaagttattccagtcggtcgcacagtgctgcatgggacagaagcaggcccagcaagtaatggaagggacaggtgccagttagacgaaactgcatctctgttgtacgtgtcagtctagaggtctcactgcaccgagttcataaactgactgaagaatcctttcagctcttcctgactttcccagccctttggtttgtgggtatctgccccaactactgttgggatcagcctcctgtcttatgtgggcacgttcca

SEQ ID NO: 174 - DNA, 538 bp, Homo sapiens
  misc_feature (1)..(538): 200871_s_at
gggacatcagtggggccaagggttctctgtccctggttcaactgtgatttggctttcccgtgtctttcctggtgatgccttgtttggggttctgtgggtttgggtgggaagagggccatctgcctgaatgtaacctgctagctctccgaagccctgcgggcctggcttgtgtgagcgtgtggacagtggtggccgcgctgtgcctgctcgtgttgcctacatgtccctggctgttgaggcgctgcttcagcctgcacccctcccttgtctcatagatgctccttttgaccttttcaaataaatatggatggcgagctcctaggcctctggcttcctggtagagggcggcatgccgaagggtctgtctgggtgtggattggatgctgggggtgtgggggttggaagctgtctgtggcccacttgggcacccacgcttctgtccacttctggttgccaggagacagcaagcaaagccagcaggacatgaagttgctattaaatggacttcgtgatttttgttttgcactaaagtttctgt

SEQ ID NO: 175 - DNA, 375 bp, Homo sapiens
  misc_feature (1)..(375): 200900_s_at
accagcgactggtagtgggagccaaaggaatggagcagtttccccacttagccttctggcaggatcttggcaacctggtagcagatggctgtgactttgtctgccgttctaaacctcgaaatgtgcctgcagcatatcgtggtgtgggggatgaccagctgggggaggagtcagaagaaagggatgaccatttattaccaatgtagattgcactttatatgtccagcctcttcctcagtcccccaaaccaaagctacacagccagatttctcaagcagtctcaactccagtccctcatctcacccttactattgctcttgctttccagtttgcttttgatttgcatcttctcactagtaaaactgccttcccttt

SEQ ID NO: 176 - DNA, 316 bp, Homo sapiens
  misc_feature (1)..(316): 200920_s_at
cactggttcccagaaaagccatgcaagggatcgggttaccgttgtattcgcatcaaccataaaatggatcctctgattggacaggcagcacagcggattggactgagcagtcaggagctgttcaggcttctcccaagtgaactcacactctgggttgacccctatgaagtgtcctacagaattggagaggatggctccatctgtgtgctgtatgaagcctcaccagcaggaggtagcactcaaaacagcaccaacgtgcaaatggtagacagccgaatcagctgtaaggaggaacttctcttgggcagaacgagcc

SEQ ID NO: 177 - DNA, 458 bp, Homo sapiens
  misc_feature (1)..(458): 200923_at
tcaccaagtctggcggctcagatcgcaccattgcctacgaaaacaaagccctgatgctctgcgaagggctcttcgtggcagacgtcaccgatttcgagggctggaaggctgcgattcccagtgccctggacaccaacagctcgaagagcacctcctccttcccctgcccggcagggcacttcaacggcttccgcacggtcatccgccccttctacctgaccaactcctcaggtgtggactagacgcgtggccaagggtggtgagaaccggagaaccccaggacgccctcactgcaggctcccctcctcggcttccttcctctctgcaatgaccttcaacaaccggccaccagatgtcgccctactcacctgaggctcagcttcaagaaattactggaaggcttccactagggtccaccaggagttctcccaccacctcaccagtttccaggtggtaag

SEQ ID NO: 178 - DNA, 505 bp, Homo sapiens
  misc_feature (1)..(505): 200942_s_at
ggaagtgtaggttacggtctgagacatcaccgccaagctgggcatcggggagatggccgagactgaccccaagaccgtgcaggacctcacctcggtggtgcagacactcctgcagcagatgcaagataaatttcagaccatgtctgaccagatcattgggagaattgatgatatgagtagtcgcattgatgatctggaaaagaatatcgcggacctcatgacacaggctggggtggaagaactggaaagtgaaaacaagatacctgccacgcaaaagagttgaaggttgctaataatttatactggaatctggcatttttccaagccaagagaagatcgaatggctttttgcagctaactactatgtgtagacaggttttatattataaagtatgcattcttatcacctagtatatagttagtttgtagagtgatttccccccagtttcttgaacatggtatcttcacatcttggaccttggtcagttgtgctattcattattaa

SEQ ID NO: 179 - DNA, 510 bp, Homo sapiens
  misc_feature (1)..(510): 200960_x_at
cagggtggcagatgaagctttctacaaacaacccttcgctgacgtgattggttatgtcacaaacataaaccatccttgctacagcctagaacaggcagcagaagaagcctttgtaaatgacattgacgagtcgtccccaggcactgagtgggaacgggtggcccggctgtgtgactttaaccccaagtctagcaagcaggccaaagatgtctcccgcatgcgctcagtcctcatctccctcaagcaggccccgctggtgcactgaagagccaccctgtggaaacactacatctgcaatatcttaatcctactcagtgaagctcttcacagtcattggattaattatgttgagttcttttggaccaaacctttttgtctttagagttgttcattgtttgtgattgcatgtttccttccttcaactgtgttctccctggcattcagagaggagggagaggaggaagaggaaggggagggaagcttcccaagagtagcctcaacctgtgcttc

SEQ ID NO: 180 - DNA, 563 bp, Homo sapiens
  misc_feature (1)..(563): 200965_s_at
agagtgcagttcccatgagtcacttcctgaacccattgaccaaaggtggacagagacaatcctgtagaccttgacattcagaaagatgtgagctgcttactgatcatatatgcatacgtttctttacagcagaggaaaccattgtccacaaaactgatgttcttttggggttttatgtacagacttgtccaatcatgtgtgtggttcctgcgagttgctgatgactccgcattgaagctctctgagttctttgattttaagttgggtttatggaattttttcaaatgttggaaggcgtgtggttcttcctgccctccctccccttttggaaatatgaaagcaaatgtttagaagaattccttttgaaaagctgtgtcgtgttccctgtgaaactgagcaggtgtgtgttggcgcgctaagtgccacatgcttgtgtgtagaggaggaggtggccctgccggctccgcgctgctgtgcctgtgatccctacctgctccccgctcctgttgccagcagcactcactgcactcctttgtcatatactctgcatcactgtcatactc

SEQ ID NO: 181 - DNA, 527 bp, Homo sapiens
  misc_feature (1)..(527): 200973_s_at
aagacctacaatggaaccaaccctgatgctgctagccgggctattgattatgtacagagacagctgcattgttgtggaattcacaactactcagactgggaaaatacagattggttcaaagaaaccaaaaaccagagtgtccctcttagctgctgcagagagactgccagcaattgtaatggcagcctggcccacccttccgacctctatgctgaggggtgtgaggctctagttgtgaagaagctacaagaaatcatgatgcatgtgatctgggccgcactggcatttgcagctattcagctgctgggcatgctgtgtgcttgcatcgtgttgtgcagaaggagtagagatcctgcttacgagctcctcatcactggcggaacctatgcatagttgacaactcttgcctgagctttttggtcttgttctgatttggaaggtgaattgagcaggtctgctgctgttggcctctggagttcatttagttaaagcacatgtacactggtgttggacagagcagcttggct

SEQ ID NO: 182 - DNA, 506 bp, Homo sapiens
  misc_feature (1)..(506): 200983_x_at
aggagttgagacctacttcacagtagttctgtggacaatcacaatgggaatccaaggagggtctgtcctgttcgggctgctgctcgtcctggctgtcttctgccattcaggtcatagcctgcagtgctacaactgtcctaacccaactgctgactgcaaaacagccgtcaattgttcatctgattttgatgcgtgtctcattaccaaagctgggttacaagtgtataacaagtgttggaagtttgagcattgcaatttcaacgacgtcacaacccgcttgagggaaaatgagctaacgtactactgctgcaagaaggacctgtgtaactttaacgaacagcttgaaaatggtgggacatccttatcagagaaaacagttcttctgctggtgactccatttctggcagcagcctggagccttcatccctaagtcaacaccaggagagcttctcccaaactccccgttcctgcgtagtccgctttctcttgctgccacattctaaagg

SEQ ID NO: 183 - DNA, 185 bp, Homo sapiens
  misc_feature (1)..(185): 201005_at
ctgatgccatcaaagaggtcttcgacaataaattccacatcatcggcgcagtgggcatcggcattgccgtggtcatgatatttggcatgatcttcagtatgatcttgtgctgtgctatccgcaggaaccgcgagatggtctagagtcagcttacatccctgagcaggaaagtttacccatgaaga

SEQ ID NO: 184 - DNA, 554 bp, Homo sapiens
  misc_feature (1)..(554): 201015_s_at
agcttcagactcaagtacccattctgttttcccccagcaacgcccctccaaacctccagcctccctgtctccagctgcctgggcccggaagggctttggttccttctctgggtctgattttctcactgaactccaccgaccaactgccctaagcccccagggcctccagggcccaggttcgagacccaaacccccaaaatccaaaacttctcttgaaaagttcagggaccgtccaggggagatggggaggagatatggagtgagtcacctgctccagaagatgccagcttctctctccagggtgcttagttggctttgcccacccctcactccccagggagctccggggacagcttcctcacacccctgtcccacccacacagctgccctagctgaccccgagaagtgctcttggctgacccctctggtgtgtggtgaggggctttctcttccccttcctgtttcagacccccccatttcccgcacatggtgtggggggctgggggaggtccaagcagagtgttttattattatcgctttatgtttttggttat

SEQ ID NO: 185 - DNA, 467 bp, Homo sapiens
  misc_feature (1)..(467): 201027_s_at
agcacatagcagtatttccctgcaagataaaaatcctccctcagtacatttttaattctcgagatccgatagtgatgggggtgacggtggaagcaggtcaggtgaaacaggggacacccatgtgtgtcccaagcaaaaattttgttgacatcggaatagtaacaagtattgaaataaaccataaacaagtggatgttgcaaaaaaaggacaagaagtttgtgtaaaaatagaacctatccctggtgagtcacccaaaatgtttggaagacattttgaagctacagatattcttgttagtaagatcagccggcagtccattgatgcactcaaagactggttcagagatgaaatgcagaagagtgactggcagcttattgtggagctgaagaaagtatttgaaatcatctaattttttcacatggagcaggaactggagtaaatgcaatactgtgttgtaatatcccaa

SEQ ID NO: 186 - DNA, 447 bp, Homo sapiens
  misc_feature (1)..(447): 201028_s_at
gatgcccttcctgacaatgaaaacaagaaacccactgcaatccccaagaaacccagtgctggggatgactttgacttaggagatgctgttgttgatggagaaaatgacgacccacgaccaccgaacccacccaaaccgatgccaaatccaaaccccaaccaccctagttcctccggtagcttttcagatgctgaccttgcggatggcgtttcaggtggagaaggaaaaggaggcagtgatggtggaggcagccacaggaaagaaggggaagaggccgacgccccaggcgtgatccccgggattgtgggggctgtcgtggtcgccgtggctggagccatctctagcttcattgcttaccagaaaaagaagctatgcttcaaagaaaatgatggctgaagacctagggaacaaggggaggtggacatggagagccaccggaatgccaac

SEQ ID NO: 187 - DNA, 219 bp, Homo sapiens
  misc_feature (1)..(219): 201036_s_at
cttgccctacattttgggcatgacataagatgtgtctttattcagctcgtcgtgaagatgctgctgctgaatgggtcagcatatctctgtttgcatggtttgcaggaggtcggttttcatggtcattcagttccacagatctgaatgattactgtctgtctgtgtcttttttccatgagaaatcactgttgcaaattgcctataaattgactctactaa

SEQ ID NO: 188 - DNA, 544 bp, Homo sapiens
  misc_feature (1)..(544): 201037_at
aaaggcgtgtttgactgcaggaagaacgtgctgggtcacatgcagcagggtggggcaccctctccatttgatagaaactttggaaccaaaatctctgccagagctatggagtggatcactgcaaaactcaaggaggcccggggcagaggaaaaaaatttaccaccgatgattccatttgtgtgctgggaataagcaaaagaaacgttatttttcaacctgtggcagagctgaagaagcaaacggattttgagcacaggattcccaaagaacagtggtggctcaagctacggcccctcatgaaaatcctggccaagtacaaggccagctatgacgtgtcggactcaggccagctggaacatgtgcagccctggagtgtctgacccagtcccgcctgcatgtgcctgcagccaccgtggactgtctgtttttgtaacacttaagttattttatcagcactttatgcacgtattattgacattaatacctaatcggcgagtgcccatctgccccaccagctccagtgcgtgctgtctgtggagtgtg

SEQ ID NO: 189 - DNA, 390 bp, Homo sapiens
  misc_feature (1)..(390): 201054_at
tcccgatctttgtagcaccatctactggcagaatggcagagtagctgcgaaacaatttgtttaaaaacttgcttaagacaattgcatcagatttggaagttttgccatcaaaattctttgcagaattggaagttaacacatttgcttgtaactgagatgggcttcacaggaatgtagttgccagttcatatcacaatagccctttctatatgaggtttgaaaatgtaaactgctatgcatagcttgggcaatagccctaaattgctatgacaactaatgaaccagctacgtatactggtattttaggtgcaagttgtaaagcaaaatatctgtgtattctgcttggttaacaaatgtatatttgtagccctttcctgcaatagcattcaa

SEQ ID NO: 190 - DNA, 525 bp, Homo sapiens
  misc_feature (1)..(525): 201069_at
ctcagagccacccctaaagagatcctttgatattttcaacgcagccctgctttgggctgccctggtgctgccacacttcaggctcttctcctttcacaaccttctgtggctcacagaacccttggagccaatggagactgtctcaagagggcactggtggcccgacagcctggcacagggcagtgggacagggcatggccaggtggccactccagacccctggcttttcactgctggctgccttagaacctttcttacattagcagtttgctttgtatgcactttgtttttttctttgggtcttgttttttttttccacttagaaattgcatttcctgacagaaggactcaggttgtctgaagtcactgcacagtgcatctcagcccacatagtgatggttcccctgttcactctacttagcatgtccctaccgagtctcttctccactggatggaggaaaaccaagccgtggcttcccgctcagccctccctgcccctcccttcaaccattccccatgggaaat

SEQ ID NO: 191 - DNA, 517 bp, Homo sapiens
  misc_feature (1)..(517): 201142_at
  misc_feature (40)..(40): n is a, c, g, or t
  misc_feature (44)..(44): n is a, c, g, or t
tacaaatgccagtaccttgccgagacttgttcactgattngccncaaccccaaggtaatggtcatctactttgcaacctatggagatcctgatagctcccatacaaagtgaggtacactgttgccaatttggaggcaggaagccatcaaactaaacgtagtttaattcagatgaacacctatcgatattcaaaaggcaaaacaaaaaaactaattccagggacattagaccttggtgaaatgccaaatggaaaatggtgctttaaaaggtagtctcttaccatataaggaataagtaaaacattagcttgtgatttctcattattcaggtcaatgttttagacacgactaacaagggacagttcaaactattaaagagaacaaatttttacttaagcactttgaggtatccactccccttaaatgtaagttatgtattttatctgttgattaaggggaggtccaagcatttgtacttggcaggaatgctggcaatagcttgtgccagattactgtat

SEQ ID NO: 192 - DNA, 303 bp, Homo sapiens
  misc_feature (1)..(303): 201162_at
ggaatgtcactggtgcccaggtgtacttgagctgtgaggtcatcggaatcccgacacctgtcctcatctggaacaaggtaaaaaggggtcactatggagttcaaaggacagaactcctgcctggtgaccgggacaacctggccattcagacccggggtggcccagaaaagcatgaagtaactggctgggtgctggtatctcctctaagtaaggaagatgctggagaatatgagtgccatgcatccaattcccaaggacaggcttcagcatcagcaaaaattacagtggttgatgccttacatg

SEQ ID NO: 193 - DNA, 510 bp, Homo sapiens
  misc_feature (1)..(510): 201189_s_at
acagtcctgcttagagcccttaaaaagacttgaaagttcactgggactcagtttaccttaatgccttagcagaagataaatcctacctagagacctttgttccttaaagcaataactgacaactctttgtagtcctccttgtgggtagttaagagtggggtcacccctttaactccaagcactacattttggcggctgcggcctctgggggaggtggcagttatgctgttactagtgattttagggctttgttatttaacttatttcaagggtgctgtgctcagccctgcccatggctgtgcagctccctccgtgcctcagatctgctgtagccagtgcagacctcactgtcgtgtccatgccacccccggcatggctccaggtggcctggtgactccatgatggacgatcttgctcccaggacctgcctcttcccaggcttcctggggaagagttgtacgcccaggcaacaagggctgagctgcgcttgcgtggctgtttcatgaccgc

SEQ ID NO: 194 - DNA, 492 bp, Homo sapiens
  misc_feature (1)..(492): 201193_at
tagccacagtattgctccctaaaatatgcataaagtagaaattcactgccttcccctcctgtccatgaccttgggcacagggaagttctggtgtcatagatatcccgttttgtgaggtagagctgtgcattaaacttgcacatgactggaacgaagtatgagtgcaactcaaatgtgttgaagatactgcagtcatttttgtaaagaccttgctgaatgtttccaatagactaaatactgtttaggccgcaggagagtttggaatccggaataaatactacctggagtcttgtcctctccatttttctctttctcctcctggcctggcctgaatattatactactctaaatagcatatttcatccaagtgcaataatgtaagctgaatcttttttggacttctgctggcctgttttatttcttttatataaatgtgatttctcagaaattgatattaaacactatcttatcttctcctgaactgttgatttt

SEQ ID NO: 195 - DNA, 506 bp, Homo sapiens
  misc_feature (1)..(506): 201231_s_at
ggcccaggccaatggttggggcgtcatggtgtctcatcgttcgggggagactgaagataccttcatcgctgacctggttgtggggctgtgcactgggcagatcaagactggtgccccttgccgatctgagcgcttggccaagtacaaccagctcctcagaattgaagaggagctgggcagcaaggctaagtttgccggcaggaacttcagaaaccccttggccaagtaagctgtgggcaggcaagccttcggtcacctgttggctacacagacccctcccctcgtgtcagctcaggcagctcgaggcccccgaccaacacttgcaggggtccctgctagttagcgccccaccgccgtggagttcgtaccgcttccttagaacttctacagaagccaagctccctggagccctgttggcagctctagcttttgcagtcgtgtaatgggcccaagtcattgtttttctcgcctcactttccaccaagtgtctagagtcatgtgagcct

SEQ ID NO: 196 - DNA, 469 bp, Homo sapiens
  misc_feature (1)..(469): 201240_s_at
gagaagttgtagctctgatgtctagctgtagtctccttgatctgctgattgcattattttaatttgcttttctgggaaagcagttttgctaaaagctgtacagactttttcttttgtacctagcagtactttatatagtatagctttgggccatgtagcattttaagactcaattttaaaaaattattaatctgttgctgactcttaattcctatttcaatatgtgtttccttgaagaattcaggatacaacttcttgtgtatgacagctttccttcacacactatttttgtgggtgtgtatatatctgatttgggaagaatttaaaaaacacatagctttttaatttgtttgaaacagactttctgcctgttacatttttgcttttaaccaattaaagaagccaatggcattttagttttatattgtgttttccactagtatatccctgttgatttgtttgtgccttt

SEQ ID NO: 197 - DNA, 385 bp, Homo sapiens
  misc_feature (1)..(385): 201241_at
aggatgggtctggcaatttccctggtggcaacagaaaaagaaaaggtttggtaccatgtatgtagcagccgtggaaaagggtgttataacacaagactcaaggaagatggaggctgtaccatatggtacaacgagatgcagttactatctgagatagaagaacacctgaactgtaccatttctcaggttgagccggatataaaggtaccagtggatgaatttgatgggaaagttacctacggtcagaaaagggctgctggtggtggaagctataaaggccatgtggatattttggcacctactgttcaagagttggctgcccttgaaaaggaggcgcagacatctttcctgcatcttggctaccttcctaaccagctgttcagaa

SEQ ID NO: 198 - DNA, 545 bp, Homo sapiens
  misc_feature (1)..(545): 201277_s_at
gcaagagccagcgacgtggtggccatcagaataactacaagccatactgaggcggccaagggagcgaccaactgatcgcacacatgctttgtttggatatggagtgaacacaattatgtaccaaatttaacttggcaaactttctattgcctgtcccatgtgcatcttatttaaaatttcccccatggaaatcactctcctgttgactatttccagagctctaggtgtttaggcagcgtgtggtgtctgagaggccatagcgccatcatgggctgatttttattaccaggtcccccagaagcaggtgagaggctctgcttctgctgccgctctgcagcctggacctgtggaccctggttgtaaagagtaaattgtatcttaggaaaccagtgtcacctttttttcaccttttaattttatattatttgcgtcatacatttcctgtaacggaagtgttaattttactgtactttttggtaccccttttgggaatctaatgtattgtaaggtattttacacgtgtcctgattttgccacaacctgga

SEQ ID NO: 199 - DNA, 509 bp, Homo sapiens
  misc_feature (1)..(509): 201302_at
agtggctagtagtttcttcatttgaaattgtaagcatccggtcagtaagaatgcccatccagttttctatatttcatagtcaaagccttgaaagcatctacaaatctctttttttaggttttgtccatagcatcagttgatccttactaagtttttcatgggagacttccttcatcacatcttatgttgaaatcactttctgtagtcaaagtataccaaaaccaatttatctgaactaaattctaaagtatggttatacaaaccatatacatctggttaccaaacataaatgctgaacattccatattattatagttaatgtcttaatccagcttgcaagtgaatggaaaaaaaaataagcttcaaactaggtattctgggaatgatgtaatgctctgaatttagtatgatataaagaaaacttttttgtgctaaaaatactttttaaaatcaattttgttgattgtagtaatttctatttgcactgtgcctttcaactccagaaacat

SEQ ID NO: 200 - DNA, 466 bp, Homo sapiens
  misc_feature (1)..(466): 201310_s_at
ggcagagcattcttttttcggcaattttgataagcaaggtgtagatttacatttttgtccttgctcccaacgaaatggataaacaaaaataaattaccatctactcatggaatgttgttgtgttagccagtctgaaagcccaccttaatttttatataactgtctttagctcttcttttgacagggcaggccttgttctgaactgtttcgcttctgactgttaaacaccgatgacgcatgcactgcacttcttcgttttcttcttgctcccccattggcctgagtttcttgtgcattactcctctccctccttcgttagaataggtatatcagctgtgtaaatagagcaagaaaacagtattctgcatctgtggcatttatgtagagttgcagttgtgtactgctgaaaatgcaggcttttgtaacagtgtgatctttactgatgcactcatgacaagtacccaat

SEQ ID NO: 201 - DNA, 299 bp, Homo sapiens
  misc_feature (1)..(299): 201324_at
caccaaattacctaggctgaggttagagagattggccagcaaaaactgtgggaagatgaactttgtcattatgatttcattatcacatgattatagaaggctgtcttagtgcaaaaaacatacttacatttcagacatatccaaagggaatactcacattttgttaagaagttgaactatgactggagtaaaccatgtattcccttatcttttactttttttctgtgacatttatgtctcatgtaatttgcattactctggtggattgttctagtactgtattgggcttcttcgttaat

SEQ ID NO: 202 - DNA, 219 bp, Homo sapiens
  misc_feature (1)..(219): 201325_s_at
ttatcgccctgagaagatctaccccagggagaatctgagacatcttgcctacttttctttattagctttctcctcatccatttcttttatacctttcctttttggggagttgttatgccatgatttttggtatttatgtaaaaggattattactaattctatttctctatgtttattctagttaaggaaatgttgagggcaagccaccaaattacctag

SEQ ID NO: 203 - DNA, 528 bp, Homo sapiens
  misc_feature (1)..(528): 201329_s_at
tccagcccgacacggaggactgaggtcgccgggaccaccctgagccggccccaggctcgtggactgagtgggaagcccatcctgaccagctgcctccgaggacccaggaaaggcaggattgaaaatgtccaggaaagtggccaagaagcagtggccttattgcatcccaaaccacgcctcttgaccaggctgcctcccttgtggcagcaacggcacagctaattctactcacagtgcttttaagtgaaaatggtcgagaaagaggcaccgggaagccgtcctggcgcctggcagtccgtgggacgggatggttctggctgtttgagattctcaaaggagcgagcatgtcgtggacacacacagactatttttagattttcttttgccttttgcaaccaggaacagcaaatgcaaaaactctttgagagggtaggagggtgggaaggaaacaaccatgtcatttcagaagttagtttgtatatattataataatcttataattgttctcagaatcccttaacagttgta

SEQ ID NO: 204 - DNA, 562 bp, Homo sapiens
  misc_feature (1)..(562): 201384_s_at
gccttttttcttaatcgtcagggcagatcttattttacagtacagtcgggggaaatagaaacatgtgaaaggcaaaaggcaggctcctaaattaatgtcagtgaagttcagggtgggcaaatgagtgtgtgtgaggtataggaaatgctgatgacttctttaatgcttgaagtccgttcacaggtatctagccctagaatgcctagaacaggaagaggcagctggtgttctgcaaaacttggacaggggcaaagttgctgaaaaagttttggtttaacccgaagataagtggaaaagagcttgtccatgaacccaggttctcactctgtttacagaagtgtgttgagtacagttggtgaaggaagaggtaacaaaaaatgctaaatattttatccatgaaaatgacttccagaaaaggaagaatatgaaccccagaccgaaggggaaaagatagttaatagtattatctaacctggttggtatttgtaatgaatggtgattttaattagtcattagccataatgatgtttatttacagtataactcctgaatgctacttaaa

SEQ ID NO: 205 - DNA, 430 bp, Homo sapiens
  misc_feature (1)..(430): 201413_at
ggaaaagtgtaccaaggccctgcaaaaggtgctgctgatacaacaatcatactttcagatgaagatttcatggaggtggtcctgggcaagcttgaccctcagaaggcattctttagtggcaggctgaaggccagagggaacatcatgctgagccagaaacttcagatgattcttaaagactacgccaagctctgaagggcacactacactattaataaaaatggaatcattaaatactctcttcacccaaatatgcttgattattctgcaaaagtgattagaactaagatgcaggggaaattgcttaacattttcagatatcagataactgcagattttcattttctactaattttcatgtatcattatttttacaaggaactatatataagctagcacatgattatccttctgttcttagatctgtatc

SEQ ID NO: 206 - DNA, 533 bp, Homo sapiens
  misc_feature (1)..(533): 201416_at
  misc_feature (360)..(360): n is a, c, g, or t
  misc_feature (361)..(361): n is a, c, g, or t
gaggtcagatttggagcttctcattgcacgcggagattattattgcatcgggttccaagccaatgggaagcccgggggaggggtttggcatgaggaagcgttggttacagcagctgattggctgcagccaagactgtgaaaggataaagaggcgcgaggcggaattggggtctgctctaagctgcagcaagagaaactgtgtgtgaggggaagaggcctgtttcgctgtcgggtctctagttcttgcacgctctttaagagtctgcactggaggaactcctgccattaccagctcccttcttgcagaagggagggggaaacatacatttattcatgccagtctgttgcatgcaggctttnnggcttcctaccttgcaacaaaataattgcaccaactccttagtgccgattccgcccacagagagtcctggagccacagtcttttttgctttgcattgtaggagagggactaagtgctagagactatgtcgctttcctgagctaccgagagcgctcgtgaactggaatcaact

SEQ ID NO: 207 - DNA, 565 bp, Homo sapiens
  misc_feature (1)..(565): 201418_s_at
gagacttgaaggagtctcccccttcctgcatcaccaccttggttttgttttattttgcttcttggtcaagaaaggaggggagaacccagcgcacccctccccccctttttttaaacgcgtgatgaagacagaaggctccggggtgacgaatttggccgatggcagatgttttgggggaacgccgggactgagagactccacgcaggcgaattcccgtttggggcctttttttcctccctcttttccccttgccccctctgcagccggaggaggagatgttgaggggaggaggccagccagtgtgaccggcgctaggaaatgacccgagaaccccgttggaagcgcagcagcgggagctaggggcgggggcggaggaggacacgaactggaagggggttcacggtcaaactgaaatggatttgcacgttggggagctggcggcggcggctgctgggcctccgccttcttttctacgtgaaatcagtgaggtgagacttcccagaccccggaggcgtggaggagaggagactgtttgatgtggtacaggggcagtcagtggagggcg

SEQ ID NO: 208 - DNA, 362 bp, Homo sapiens
  misc_feature (1)..(362): 201427_s_at
gatccagaaatacttaacacgtgaatattttgctaaaaaagcatatataactattttaaatatccatttatcttttgtatatctaagactcatcctgatttttactatcacacatgaataaaggcctttgtatctttctttctctaatgttgtatcatactcttctaaaacttgagtggctgtcttaaaagatataaggggaaagataatattgtctgtctctatattgcttagtaagtatttccatagtcaatgatggtttaataggtaaaccaaaccctataaacctgacctcctttatggttaatactattaagcaagaatgcagtacagaattggatacagtacggatttgtccaaat

SEQ ID NO: 209 - DNA, 468 bp, Homo sapiens
  misc_feature (1)..(468): 201432_at
ttagcgttcatccgtgtaacccgctcatcactggatgaagattctcctgtgctagatgtgcaaatgcaagctagtggcttcaaaatagagaatcccactttctatagcagattgtgtaacaattttaatgctatttccccaggggaaaatgaaggttaggatttaacagtcatttaaaaaaaaaatttgttttgacggatgattggattattcatttaaaatgattagaaggcaagtttctagctagaaatatgattttatttgacaaaatttgttgaaattatgtatgtttacatatcacctcatggcctattatattaaaatatggctataaatatataaaaagaaaagataaagatgatctactcagaaatttttatttttctaaggttctcataggaaaagtacatttaatacagcagtgtcatcagaagataacttgagcaccgtcatggcttaatgtttatt

SEQ ID NO: 210 - DNA, 529 bp, Homo sapiens
  misc_feature (1)..(529): 201459_at
ggagtgctgttcatcgacgaggtccacatgctggacatcgagagcttctccttcctcaaccgggccctggagagtgacatggcgcctgtcctgatcatggccaccaaccgtggcatcacgcgaatccggggcaccagctaccagagccctcacggcatccccatagacctgctggaccggctgcttatcgtctccaccaccccctacagcgagaaagacacgaagcagatcctccgcatccggtgcgaggaagaagatgtggagatgagtgaggacgcctacacggtgctgacccgcatcgggctggagacgtcactgcgctacgccatccagctcatcacagctgccagcttggtgtgccggaaacgcaagggtacagaagtgcaggtggatgacatcaagcgggtctactcactcttcctggacgagtcccgctccacgcagtacatgaaggagtaccaggacgccttcctcttcaacgaactcaaaggcgagaccatggacacctcctgagttggatgtcatcccc

SEQ ID NO: 211 - DNA, 512 bp, Homo sapiens
  misc_feature (1)..(512): 201491_at
cctgacgtcaccagaggagctctatagagtgtttaccacccaagagctggtgcaggcctttacccatgctcctgcaacattagaagcagacagaggtggaaagttccacatggtagatggcaacgtctctggggaatttactgatctggtccctgagaaacatattgtgatgaagtggaggtttaaatcttggccagagggacactttgccaccatcaccttgaccttcatcgacaagaacggagagactgagctgtgcatggaaggtcgaggcatccctgctcctgaggaagagcggacacgacagggctggcagcggtactactttgagggcattaaacagacctttggctatggcgcacgcttattttagggccagcggcaggggactccagcctgctggacacttcagtccagctctctcctgactggggcttgcgactcacaggattgcatcgtcccagctgctaacttggggccggggcccctcccttccacatataccttgggtt

SEQ ID NO: 212 - DNA, 459 bp, Homo sapiens
  misc_feature (1)..(459): 201503_at
  misc_feature (376)..(376): n is a, c, g, or t
aaaacccagataacaaccagagcaaaactgttgtgccttctatttatctttgatttcagtcttggcaattgtttaaaaaaaaaatctagatttgttttattaggttcagagtatgtggggaattatagaatccctctttcatcactttgtgtatgtcttttgttaacatatttgttatgccttattctaaaattgagtctcaaactggaatgcctttgaagacagatgcttctatagaggttctttgacctaaatagttcagcatttgtatttttattctggtatctaatcagattcctaatcatagcccgtaagaaggaatgttactttaatattggactttgctcatgtgctcgtgtccgcatttttttttttncttaaaatcatagccatatggtaaattttctattttgttatggttctcttttattgatgggcatgcagtgggtgttacttgga

SEQ ID NO: 213 - DNA, 545 bp, Homo sapiens
  misc_feature (1)..(545): 201506_at
acaggaggaatgcaccacggcagctctccgccaatttctctcagatttccacagagactgtttgaatgttttcaaaaccaagtatcacactttaatgtacatgggccgcaccataatgagatgtgagccttgtgcatgtgggggaggagggagagagatgtactttttaaatcatgttccccctaaacatggctgttaacccactgcatgcagaaacttggatgtcactgcctgacattcacttccagagaggacctatcccaaatgtggaattgactgcctatgccaagtccctggaaaaggagcttcagtattgtggggctcataaaacatgaatcaagcaatccagcctcatgggaagtcctggcacagtttttgtaaagcccttgcacagctggagaaatggcatcattataagctatgagttgaaatgttctgtcaaatgtgtctcacatctacacgtggcttggaggcttttatggggccctgtccaggtagaaaagaaatggtatgtagagcttagatttccctattgtgacagagcc

SEQ ID NO: 214 - DNA, 458 bp, Homo sapiens
  misc_feature (1)..(458): 201531_at
atcaagtaatccccttttccagaatgcattaacccactcccctgacctcacgctggggcaggtccccaagtgtgcaagctcagtattcatgatggtgggggatggagtgtcttccgaggttcttgggggaaaaaaaattgtagcatatttaagggaggcaatgaaccctctcccccacctcttccctgcccaaatctgtctcctagaatcttatgtgctgtgaataataggccttcactgcccctccagtttttatagacctgaggttccagtgtctcctggtaactggaacctctcctgagggggaatcctggtgctcaaattaccctccaaaagcaagtagccaaagccgttgccaaaccccacccataaatcaatgggccctttatttatgacgactttatttattctaatatgattttatagtatttatatatattgggtcgtctgcttccctt

SEQ ID NO: 215 - DNA, 460 bp, Homo sapiens
  misc_feature (1)..(460): 201555_at
tcatctgaggaggcctcgtctctgaacttgggttgtgccgagagagtttgttctgtgtttcccaccctctccctgacccaagtctttgcctctactcccttaacagtgttgaattcaactgaaggcgaggaatgttggtgatgaagctgagttcaggactcggtggaccctttgggaatgggtcatgaaagctgccatggggtgaggaaagaggagacagtgggagaggacaatgactattgcatcttcattgcaaaagcactggctcatccgccctacttcccatcccacacaaacccaattgtaaataacatatgacttctgagtacttttgggggcacaactgttttctgtttgctgtttttttgttttgttttttttctccagagcactttggtctagactaggctttgggtggttccaattggtggagagaagctctgaggcacgtcatgcaggt

SEQ ID NO: 216 - DNA, 556 bp, Homo sapiens
  misc_feature (1)..(556): 201562_s_at
gatgttaatgggctctgctcatccccacagtcttgggatctcagggcacaatggctggacatgggtgggctctgatgcagaactttctcttttgaatgttaagaataactaatacaattcattgtgaacagaagtccttaagcagaggaattggtgtgccttaaagatacaatctgggatagtttgggggaacttgtagccagaatgccctgttcatgctgagcaaagttcagcaagtagagcagagtttggcaggcaggtgccaggaactccccttcttcctggagtgccttcattgaggaaggaaatctggcccttgggtttcctggttccactgctactgacccagaggggaatgagggctgagttatgaaaagataacttcatgaagacttaactggcccagaagctgattttcatgaaaatctgccactcagggtctgggatgaaggcttgtcagcacttccagtttagaacgcaatgtttctagagacatattggctgtttgttttgatgataaaaggagaataagaaaaggcatcactttcctggatcc

SEQ ID NO: 217 - DNA, 446 bp, Homo sapiens
  misc_feature (1)..(446): 201563_at
aggaaactgctacttgtggacctcaccagagaccaggagggtttggttagctcacaggacttcccccaccccagaagattagcatcccatactagactcatactcaactcaactaggctcatactcaattgatggttattagacaattccatttctttctggttattataaacagaaaatctttcctcttctcattaccagtaaaggctcttggtatctttctgttggaatgatttctatgaacttgtcttattttaatggtgggttttttttctggtaagatttagacctaaatcgcatcatgccaacttgtgactttgagactattcatcaagaatgaggatatagtagccatgacatagcttgagctatagcctttaattccttactttggctatgggtggagggtgagtttgaagaggttctgattttcttgtaacctggga

SEQ ID NO: 218 - DNA, 354 bp, Homo sapiens
  misc_feature (1)..(354): 201564_s_at
ccctggagcggcagggcgtgacggccacagggtctgcccgctgcacgttctgccaaggtggtggtggcgggcgggtaggggtgtgggggccgtcttcctcctgtctctttcctttcaccctagcctgactggaagcagaaaatgaccaaatcagtattttttttaatgaaatattattgctggaggcgtcccaggcaagcctggctgtagtagcgagtgatctggcggggggcgtctcagcaccctccccagggggtgcatctcagccccctctttccgtccttcccgtccagccccagccctgggcctgggctgccgacacctgggccagagcccctgctgtgattggtgctc

SEQ ID NO: 219 - DNA, 453 bp, Homo sapiens
  misc_feature (1)..(453): 201565_s_at
gaaaaacagcctgtcggaccacagcctgggcatctcccggagcaaaacccctgtggacgacccgatgagcctgctatacaacatgaacgactgctactccaagctcaaggagctggtgcccagcatcccccagaacaagaaggtgagcaagatggaaatcctgcagcacctcatcgactacatcttggacctgcagatcgccctggactcgcatcccactattgtcagcctgcatcaccagagacccgggcagaaccagcgctccaggacgccgctgaccaccctcaacacggatatcagcatcctgtccttgcaggcttctgaattcccttctgagttaatgtcaaatgacagcaaagcactgtgtggctgaataagcggtgttcatgatttcttttattctttgcacaacaacaacaacaacaaattcacggaatcttttaagtgctgaac

SEQ ID NO: 220 - DNA, 555 bp, Homo sapiens
  misc_feature (1)..(555): 201566_x_at
ctgaattcccttctgagttaatgtcaaatgacagcaaagcactgtgtggctgaataagcggtgttcatgatttcttttattctttgcacaacaacaacaacaacaaattcacggaatcttttaagtgctgaacttatttttcaaccatttcacaaggaggacaagttgaatggacctttttaaaaagaaaaaaaaaatgaaggaaaactaagaatgatcatcttcccagggttcttacttgactgtaattcgttatttatgaaaaaaccttttaaatgccctttctgcagttggaaggttttctttatatactattcccaccatggggagcgaaaacgttaaaatcacaaggaattgcccaatctaagcagactttgccttttttcaaaggtggagcgtgataccagaaggatccagtattcagtcacttaaatgaagtcttttggtcagaaattacctttttcacacaagcctactgaatgctgtgtatatatttatatataaatatatctatttgagtgaaaccttgtgaacctttaattagagtcttcttgt

SEQ ID NO: 221 - DNA, 521 bp, Homo sapiens
  misc_feature (1)..(521): 201577_at
gattccgccttgttggtctgaaattcatgcaagcttccgaagatcttctcaaggaacactacgttgacctgaaggaccgtccattctttgccggcctggtgaaatacatgcactcagggccggtagttgccatggtctgggaggggctgaatgtggtgaagacgggccgagtcatgctcggggagaccaaccctgcagactccaagcctgggaccatccgtggagacttctgcatacaagttggcaggaacattatacatggcagtgattctgtggagagtgcagagaaggagatcggcttgtggtttcaccctgaggaactggtagattacacgagctgtgctcagaactggatctatgaatgacaggagggcagaccacattgcttttcacatccatttcccctccttcccatgggcagaggaccaggctgtaggaaatctagttatttacaggaacttcatcataatttggagggaagctcttggagctgtgagttctccctgtacagtgttaccatc

SEQ ID NO: 222 - DNA, 419 bp, Homo sapiens
  misc_feature (1)..(419): 201596_x_at
gagagcaccacagtggtcaccacacagtctgctgaggttggagctgctgagacgacgctcacagagctgagacgtacagtccagtccttggagatcgacctggactccatgagaaatctgaaggccagcttggagaacagcctgagggaggtggaggcccgctacgccctacagatggagcagctcaacgggatcctgctgcaccttgagtcagagctggcacagacccgggcagagggacagcgccaggcccaggagtatgaggccctgctgaacatcaaggtcaagctggaggctgagatcgccacctaccgccgcctgctggaagatggcgaggactttaatcttggtgatgccttggacagcagcaactccatgcaaaccatccaaaagaccaccacccgccggatagtggatgg

SEQ ID NO: 223 - DNA, 540 bp, Homo sapiens
  misc_feature (1)..(540): 201631_s_at
gaggcgcacagagaccgaggcgcatagagaccgaggcacagcccagctggggctaggcccggtgggaaggagagcgtcgttaatttatttcttattgctcctaattaatatttatatgtatttatgtacgtcctcctaggtgatggagatgtgtacgtaatatttattttaacttatgcaagggtgtgagatgttccccctgctgtaaatgcaggtctcttggtatttattgagctttgtgggactggtggaagcaggacacctggaactgcggcaaagtaggagaagaaatggggaggactcgggtgggggaggacgtcccggctgggatgaagtctggtggtgggtcgtaagtttaggaggtgactgcatcctccagcatctcaactccgtctgtctactgtgtgagacttcggcggaccattaggaatgagatccgtgagatccttccatcttcttgaagtcgcctttagggtggctacgaggtagaggggtgggggttggtgggctgtcacggagcgactgtcgagatcgcctagt

SEQ ID NO: 224 - DNA, 551 bp, Homo sapiens
  misc_feature (1)..(551): 201743_at
ccatccagaatctagcgctgcgcaacacaggaatggagacgcccacaggcgtgtgcgccgcactggcggcggcaggtgtgcagccccacagcctagacctcagccacaactcgctgcgcgccaccgtaaaccctagcgctccgagatgcatgtggtccagcgccctgaactccctcaatctgtcgttcgctgggctggaacaggtgcctaaaggactgccagccaagctcagagtgctcgatctcagctgcaacagactgaacagggcgccgcagcctgacgagctgcccgaggtggataacctgacactggacgggaatcccttcctggtccctggaactgccctcccccacgagggctcaatgaactccggcgtggtcccagcctgtgcacgttcgaccctgtcggtgggggtgtcgggaaccctggtgctgctccaaggggcccggggctttgcctaagatccaagacagaataatgaatggactcaaactgccttggcttcaggggagtcccgtcaggacgttgaggacttttcgaccaattcaacc

SEQ ID NO: 225 - DNA, 535 bp, Homo sapiens
  misc_feature (1)..(535): 201765_s_at
ggagctggaactggtcaccaaggccggcttccgggcccttctctctgccccctggtacctgaaccgtatatcctatggccctgactggaaggatttctacgtagtggaacccctggcatttgaaggtacccctgagcagaaggctctggtgattggtggagaggcttgtatgtggggagaatatgtggacaacacaaacctggtccccaggctctggcccagagcaggggctgttgccgaaaggctgtggagcaacaagttgacatctgacctgacatttgcctatgaacgtttgtcacacttccgctgtgagttgctgaggcgaggtgtccaggcccaacccctcaatgtaggcttctgtgagcaggagtttgaacagacctgagccccaggcaccgaggagggtgctggctgtaggtgaatggtagtggagccaggcttccactgcatcctggccaggggacggagccccttgccttcgtgccccttgcctgcgtgcccctgtgcttggagagaaaggggccggtgctggcgc

SEQ ID NO: 226 - DNA, 463 bp, Homo sapiens
  misc_feature (1)..(463): 201825_s_at
aggcaacttctcataaaattcccatggttcttctcctttggctatttttcaaaacaaggcccaacacaaaaacagattgatgctgcctcattcacgctgacattctttggtcaaggatacagccaaggcactggtacagataagaacaaaccaaatatcaaaatttgtactcaggtgaaaggaccagaggctggctatgtggctacccccatagctatggttcaggcagccatgactcttctaagtgatgcttctcatctgcctaaggcgggcggggtcttcacacctggagcagctttttccaaaacaaagttgattgacagactcaacaaacacggtattgagtttagtgttattagcagctctgaagtctaaacactggaagaattaactgaagtcataacgtgcgtgaattaacagcttctctatttgatatttgaaattcttctgtaagcctgtctga

SEQ ID NO: 227 - DNA, 378 bp, Homo sapiens
  misc_feature (1)..(378): 201830_s_at
agaacatggtaagcctggtattttttaatcaaacaaaatatttatgaaatgggttttctcttaattctggattcatcatggctttctaataccaattgtaatatttacaatattcaccaaaacttagaattttgcaaatgcaggaattctgccagtgtttctttgctaagccttgcatgcaaaatttgaaattttaacattggcacccaaaacctacatggaatgtatgtctggagtatttcaaactttacattgaaacataatttccttggaaaacaaaccataagcctgaggaggtttttatcaactggaatgctttatattagtttgtttttcactgtacattcctcattttacattcatttaacctgccgatta

SEQ ID NO: 228 - DNA, 378 bp, Homo sapiens
  misc_feature (1)..(378): 201890_at
gctactttgaattaatctgcctttatgtttgggagaagaaagctgagacattgcatgaaagatgatgagagataaatgttgatcttttggccccatttgttaattgtattcagtatttgaacgtcgtcctgtttattgttagttttcttcatcatttattgtatagacaatttttaaatctctgtaatatgatacattttcctatcttttaagttattgttacctaaagttaatccagattatatggtccttatatgtgtacaacattaaaatgaaaggctttgtcttgcattgtgaggtacaggcggaagttggaatcaggttttaggattctgtctctcattagctgaataatgtgaggattaacttctgccagct

SEQ ID NO: 229 - DNA, 519 bp, Homo sapiens
  misc_feature (1)..(519): 201892_s_at
tgtcagagtatgcacggcgctttggtgttccggtcattgctgatggaggaatccaaaatgtgggtcatattgcgaaagccttggcccttggggcctccacagtcatgatgggctctctcctggctgccaccactgaggcccctggtgaatacttcttttccgatgggatccggctaaagaaatatcgcggtatgggttctctcgatgccatggacaagcacctcagcagccagaacagatatttcagtgaagctgacaaaatcaaagtggcccagggagtgtctggtgctgtgcaggacaaagggtcaatccacaaatttgtcccttacctgattgctggcatccaacactcatgccaggacattggtgccaagagcttgacccaagtccgagccatgatgtactctggggagcttaagtttgagaagagaacgtcctcagcccaggtggaaggtggcgtccatagcctccattcgtatgagaagcggcttttctgaaaagggatccagcacacctcct

SEQ ID NO: 230 - DNA, 386 bp, Homo sapiens
  misc_feature (1)..(386): 201951_at
gaccagatatgggctacttgtgactagacttttaaactttgctctttcaagcagaagcctggtttctgggagaacactgcacagcgatttctttcccaggatttacacaactttaaagggaagataaatgaacatcagatttctaggtatagaactatgttattgaaaggaaaaggaaaactggtgtttgtttcttagactcatgaaataaaaaattatgaaggcaatgaaaaataaattgaaaattaaagtcagatgagaataggaataatactttgccacttctgcattatttagaaacatacgttattgtacatttgtaaaccatttactgtctgggcaatagtgactccgtttaataaaagcttccgtagtgcattggtatg

SEQ ID NO: 231 - DNA, 511 bp, Homo sapiens
  misc_feature (1)..(511): 201964_at
ggcctttcacagcggaatgcagttgtacctcacattacttttgaaacttcactcgttccagttggtacaagtatttgccaaagccatttcctatgttcaccgtggcccctcctgatgtggctgtcagcgcagcgttgttgaacagggctattctttttacaaggtgtgaagtgtggctcttcgcttcgtctttgccatggcattaaaagaaagttccctgtcttctttcaatattagttatttcaaatgaatatgtgctacttaaaagcttgttttgtttctttgtatataatttgccttggatttattgtgcacagtttgttgagttgtatgtttttgtgaattatcaggagtaaatttgacaagtacatgtgaataacctcctgtaaatgaattttataacaaaaatgtactgaactattttttaaagttgtgcagattagcaattttttgctatagctttgacttttctatgctgtgaattaatagctgcgatttggcaaacagccct

SEQ ID NO: 232 - DNA, 438 bp, Homo sapiens
  misc_feature (1)..(438): 201970_s_at
gaggaactaaaggaactgctacccgaaattagagagaagatagaagatgcaaaggagtctcagcgtagtgggaatgtagctgaactggctctgaaagctactctggtggagagttctacttcaggtttcactcctggtggaggaggctcttcagtctccatgattgccagtagaaagccaacagacggtgcttcctcatcaaattgtgtgactgatatttcccaccttgtcagaaagaagaggaaaccagaggaagagagtccccggaaagatgatgcaaagaaagccaaacaagagccggaggtgaacggaggcagtggggatgctgtcccgagtggaaatgaagtttcggaaaacatggaggaggaggctgagaatcagctgaaacgcggagcagcagtggaggggacactggaggctggagctacagttgaaagc

SEQ ID NO: 233 - DNA, 463 bp, Homo sapiens
  misc_feature (1)..(463): 201989_s_at
  misc_feature (136)..(136): n is a, c, g, or t
aggtttgttgatattcaggccttcagaatttaagggttttaaatatagcattcagattgtaattggtatgtttttgccatctggtccactcaattgtatatttttattttgcaaaacaacccaaaacttactttangttgctttgttcagtaccttttgaattcccccagaagagttgttttcaaaacaaacattccagaatgaatgtcgctcttcaatggaacgtctttattgtgcttgaagtatttcttctctggttgtaattctaaattacagagtcatttgagctttctcccctcccgctagtatctttacaggagcagggaagagcagtagaggatgtataattttgggcgaagttaaattacaatttatttgaggttattcctaaacctatttatttggtgttttggaggagatcacacactaagagaacgttgattgcctcggctattgtgctggc

SEQ ID NO: 234 - DNA, 448 bp, Homo sapiens
  misc_feature (1)..(448): 202003_s_at
aggtgaatgaagcttttgctccccagtacttggctgttgagaggagtttggatcttgacataagtaaaaccaatgtgaatggaggagccattgctttgggtcacccactgggaggatctggatcaagaattactgcacacctggttcacgaattaaggcgtcgaggtggaaaatatgccgttggatcagcttgcattggaggtggccaaggtattgctgtcatcattcagagcacagcctgaagagaccagtgagctcactgtgacccatccttactctacttggccaggccacagtaaaacaagtgaccttcagagcagctgccacaactggccatgccctgccattgaaacagtgattaagtttgatcaagccatggtgacacaaaaatgcattgatcatgaataggagcccatgctagaagtacattctctcagatttgaaccag

SEQ ID NO: 235 - DNA, 468 bp, Homo sapiens
  misc_feature (1)..(468): 202016_at
gcatacccttactctgccagagtagtgaagctaattaaacacgtttggtttctgaataaattgaactaaatccaaactatttcctaaaatcacaggacattaaggaccaatagcatctgtgccagagatgtactgttattagctgggaagaccaattctaacagcaaataacagtctgagactcctcatacctcagtggttagaagcatgtctctcttgagctacagtagaggggaagggattgttgtgtagtcaagtcaccatgctgaatgtacactgattcctttatgatgactgcttaactccccactgcctgtcccagagaggctttccaatgtagctcagtaattcctgttactttacagacaggaaagttccagaaactttaagaacaaactctgaaagacctatgagcaaatggtgctgaatactttttttttaaagccacatttcattgtcttagtcaaa

SEQ ID NO: 236 - DNA, 516 bp, Homo sapiens
  misc_feature (1)..(516): 202048_s_at
tgcccttgctgctgggtggagtggagagggagacttctttttgttggttttaatttaaaaacacaaaggcctaaagaaatacgtatcttataatttttttaatttttgagacgttcatttaatgaattgtgcacgaatgaattctatatatataaaatatacatatatagctctatatttggggaggggcactgtctcttttttctctcatttttaaaatgaagtgttgttgcctttgtatgtggttcaaccatccagctcccagctggctaaactttgcctccagtggtcaaagatgggaaaagagtggggttggcaggagatggaaaacggaggtgccgccccagcatggggggcaggtcccccagtccaccctgcccctccccctgtggagaagacgcttagttgggggtgtgggtttgggctccattctggattcggcggttccgggggaggggtgggtctgtgccgattactctgtcttgtacgtttgttctgctgctcttcaatattgta

SEQ ID NO: 237 - DNA, 525 bp, Homo sapiens
  misc_feature (1)..(525): 202072_at
ggagaacttctttgagatctgcgatgagctgggagtgaagcggccatcttctgtgaaagtattctcaggcaaaagtgagcgcagctcctctggactgctggagtgggaatccaagagcgatgccctggagactctgggcttcctgaaccattaccagatgaaaaacccaaatggtccatacccttacactctgaagttgtgtttctccactgctcagcacgcctcctaattaggtgcctaggaagagtcccatctgagcaggaagacatttctctttcctttatgccattttttgtttttgttatttgcaaaagatcttgtattcctttttttttttttttttttttaaatgctaggtttgtagaggcttacttaaccttaatggaaacgctggaaatctgcagggggagggagaggggaactgttatctcccaagattaaccttcacttttaaaaaattattgtacatgtgatttttttttttcctgttcatacatttgtgctgcccatgtactcttggcacat

SEQ ID NO: 238 - DNA, 499 bp, Homo sapiens
  misc_feature (1)..(499): 202086_at
aggacaaggacacctacagctggctcctgaaggagcggagcgacaccagcgacaagcggaagttcctgaaggagcggcttgcacggctgacgcaggctcggcgccggcttgcccagttccccggttaaccacactctgtccagccccgtagacgtgcacgcacactgtctgcccccgttcccgggtagccactggactgacgacttgagtgctcagtagtcagactggatagtccgtctctgcttatccgttagccgtggtgatttagcaggaagctgtgagagcagtttggtttctagcatgaagacagagccccaccctcagatgcacatgagctggcgggattgaaggatgctgtcttcgtactgggaaagggattttcagccctcagaatcgctccaccttgcagctctccccttctctgtattcctagaaactgacacatgctgaacatcacagcttatttcctcatttttataatgtcccttcacaaacccag

SEQ ID NO: 239 - DNA, 530 bp, Homo sapiens
  misc_feature (1)..(530): 202107_s_at
agcacttgatgaactcggggtactagggtcagggcttatagcaggatgtctggctgcacctggcatgactgtttgtttctccaagcctgctttgtgcttctcacctttgggtgggatgccttgccagtgtgtcttacttggttgctgaacatcttgccacctccgagtgctttgtctccactcagtaccttggatcagagctgctgagttcaggatgcctgcgtgtggtttaggtgttagccttcttacatggatgtcaggagagctgctgccctcttggcgtgagttgcgtattcaggctgcttttgctcgctttggccagagagctggttgaagatgtttgtaatcgttttcagtctcctgcaggtttctgtgcccctgtggtggaagaggcacgacagtgccagcgcagcgttctgggctcctcagtcgcaggggtgggatgtgagtcatgcggattatccactcgccacagttatcagctgccattgctccctgtctgtttccccactctcttatttgtgcattcg

SEQ ID NO: 240 - DNA, 566 bp, Homo sapiens
  misc_feature (1)..(566): 202112_at
gatactcacttctgcaaggtcaatgagagaggagagtacttctgggagaagagggtcacaggctgcccaccctttgatgaacacaagtgtctggctgagggaggtaaaattatgaaaattccaggcacctgctgtgacacatgtgaggagcctgagtgcaacgacatcactgccaggctgcagtatgtcaaggtgggaagctgtaagtctgaagtagaggtggatatccactactgccagggcaaatgtgccagcaaagccatgtactccattgacatcaacgatgtgcaggaccagtgctcctgctgctctccgacacggacggagcccatgcaggtggccctgcactgcaccaatggctctgttgtgtaccatgaggttctcaatgccatggagtgcaaatgctcccccaggaagtgcagcaagtgaggctgctgcagctgcatgggtgcctgctgctgcctgccttggcctgatggccaggccagagtgctgccagtcctctgcatgttctgctcttgtgcccttctgagcccacaataaaggctgagctcttatcttgctgc

SEQ ID NO: 241 - DNA, 471 bp, Homo sapiens
  misc_feature (1)..(471): 202201_at
atgtggacaagaccgtggctggccaggacgctgtcatcgtgctgctgggcacccgcaatgacctcagtcccacgacagttatgtccgagggcgcccggaacattgtggcagccatgaaggctcatggtgtggacaaggtcgtggcctgcacctcggctttcctgctctgggaccctaccaaggtgcccccacgactgcaggctgtgactgatgaccacatccggatgcacaaggtgctgcgggaatcaggcctgaagtacgtggctgtgatgccgccacacataggagaccagccactaactggggcgtacacagtgaccctggatggacgagggccctcaagggtcatctccaaacatgacctgggccatttcatgctgcgctgcctcaccaccgatgagtacgacggacacagcacctacccctcccaccagtaccagtagcactctgtccccatctgggagggtggca

SEQ ID NO: 242 - DNA, 496 bp, Homo sapiens
  misc_feature (1)..(496): 202206_at
ttgcagaagctgtcacttaccctgaaacacagtatcaaaagggaaacttaaaacatactgtttgatttttttatttcctcttacaatccatgttttcaggtagaattatgactttccccccattgttacacatttctttacaaaggaggcctgtagaaattggacacgatcatgcttgagcatgtgagttagtcaaattatgagtccctgcctattgtccattacacaccgaatgttaatttaagaaccagaggcagaagttctggcttcctgcttgaaacccaattcttatatgaaattttttaaaagcagaaacctagcagcccatctgctttttctcttttgtcggtgtatttggtacccctccaatgctggtctttttgtagaaactcagtagagaaagtctagctaagcagtgttgaaaagcctgcaagatttcagtttacatatcgacagcatatccactgatttctaaatgggctggtcccatcatctg

SEQ ID NO: 243 - DNA, 491 bp, Homo sapiens
  misc_feature (1)..(491): 202207_at
  misc_feature (52)..(52): n is a, c, g, or t
agatcactgttcaaaccctgtcatgctttaaaactgatgcgagatgattttnttttttgcataatcaatacttaagggtgcaatcaactgttagtaattgtgcagtaaagtaaagccctgtggtgtatcaactactagttaagagtctcagttgatttctgtaatgtttgacctaataatagcccgtttcgtctctgacccaacagaggaagcacagatcaaatcaccttggagtggtcaccagggggacagggagccccccaccaatgtatcaatgggtgatttatgatgccttctgccctttggcgagtgaatgggtttcccataggggaagttggcctccctccgtgagctttggaaatgttttctaatagacacagggaggccagttctgtttcagagcaattatcttcccaaattctctgttctggtgttggaactgtgtgccctggtttctgttttcctttctactgctgtaattctctgtctca

SEQ ID NO: 244 - DNA, 473 bp, Homo sapiens
  misc_feature (1)..(473): 202208_s_at
cccaggtggaaggctcagttgtcggaaagacaaaagcgatttcttcccactcctgcagggccagaagttcaggctgccccgcctccactgggggatcgcacctgtgaattacctgaggtatgcatttcccagaaccgtgggcgtacccaccttggggggcatgttggttctggggggaccacctctccttgcattcaggggctgtgaagctgagtaattttcggtcacagggcaggcccctgttgaaatttcatttgtcctgctctgggcccaaaggtggtggtggtttgggtcatcagaggactgcctgggacggttcagcgggcacggagcgctgtgctggcctggctggggatggccgcggaggtgcccttttcctggtgctttgtggtggctgcagaagaccagttttgttgagaactgcttttcagcctggaatcagacatcttccagatggtttggaccctgtccat

SEQ ID NO: 245 - DNA, 481 bp, Homo sapiens
  misc_feature (1)..(481): 202262_x_at
ctcgcactgttgtggcaggcagcagcgacgctgcccaaaaggctgtccgggcaatggcagtgctgacagatcacccatatgcctccctgaccctcccagatgacgcagctgctgactgcctctttcttcgtcctgggttgcctggtgtgccccctttcctcctgcaccgtggaggtggggatctgcccaacagccaggaggcactgcagaagctctctgatgtcaccctggtacctgtgtcctgctcagaactggagaaggctggcgccgggctcagctccctctgcttggtgctcagcacacgcccccacagctgagggcctggccttggggtactgctggccaggggtaggatagtataggaagtagaaggggaaggagggttagatagagaatgctgaataggcagtagttgggagagagcctcaatattgggggaggggagagtgtagggaaaaggatccactgggtgaatcctccc

SEQ ID NO: 246 - DNA, 440 bp, Homo sapiens
  misc_feature (1)..(440): 202320_at
tgcagcaggggacgggtgctttggccagagtcacagactgacacgtttcccactgtactggaactctggaaagaggggctccccgacctgcccatcccccaggctcttctgggccttccccttgggaactggcctcatcacactgggagttggtgcttcttgtctctgggtctccagagtttgccccgcctgtgcacacctcacattccagactctagccatctcggcaggatctcctggctccttgagtgcccaggtgccaccaagaggaagggccttgtgggatacaccttgcagaatagggatcggtgtgccccgctgcgaggggccccccatgggggctgtggcccctccgcaggcaggacatcccaacccctggctgggactgaaccacccagagcggagcggctcccttttcagccttgtgagtcacctggcag

SEQ ID NO: 247 - DNA, 553 bp, Homo sapiens
  misc_feature (1)..(553): 202322_s_at
gttctcatttcctactattcatgctatttggtcaaggcctgaaagcacccaggtgcagaatatcttgcgccagagaacagaaaacatagatataaaaaaatactgtgtacattatcttgaggatgtaggttcttttgaatacactcgtaatacccttaaagagcttgaagctaaagcctataaacagattgatgcacgtggtgggaaccctgagctagtagccttagtaaaacacttaagtaagatgttcaaagaagaaaatgaataatgttaagccattcttgattggacctcatagcttattttagttaatcttttttttgtcttttagccttaccaccttttaaaaaatttgttattctccagaaacagtaaataggtgagtaggggtggtgcaagtgaattcgttttcatttagaagcccctctgtacagataatcaaaattcaaagttgaaagaatcaaaagcagccacagttatgtaggtctgatttgaatgtcataattgcagtgacaggacattgccaccaactctatcctactaccatcaatgt

SEQ ID NO: 248 - DNA, 468 bp, Homo sapiens
  misc_feature (1)..(468): 202345_s_at
gaaggaagatggcgcctggtggacagcaaaggctttgatgaatacatgaaggagctaggagtgggaatagctttgcgaaaaatgggcgcaatggccaagccagattgtatcatcacttgtgatggtaaaaacctcaccataaaaactgagagcactttgaaaacaacacagttttcttgtaccctgggagagaagtttgaagaaaccacagctgatggcagaaaaactcagactgtctgcaactttacagatggtgcattggttcagcatcaggagtgggatgggaaggaaagcacaataacaagaaaattgaaagatgggaaattagtggtggagtgtgtcatgaacaatgtcacctgtactcggatctatgaaaaagtagaataaaaattccatcatcactttggacaggagttaattaagagaatgaccaagctcagttcaatgagcaaatctccatactgtttc

SEQ ID NO: 249 - DNA, 397 bp, Homo sapiens
  misc_feature (1)..(397): 202371_at
gaaaaactaataaggggctggctcattacctcaaggagtataaagaggccatacacgatatgaatttcagcaatgaggacatgataggagaatttgacaatatggctaaggtgcaggatgagaagagaaaaagcaaacagaaattgggggcgtttttgtggatgcaaagaaatttacaggaccccttctaccctagaggtccaagggaattcaggggtggctgcagggccccacgaagggacattgaagacattccttatgtgtagtgtccctggcaggcatttaccaggccatgtgctttaacgttacggtaatactttactttaggcatccctcctgttgctagcagccttttgacctatctgcaatgcagtgttctcagtaggaaatgttcatc

SEQ ID NO: 250 - DNA, 450 bp, Homo sapiens
  misc_feature (1)..(450): 202388_at
gctggtatcagaacagcttccctcactgtgtacagaacgcaagaagggaataggtggtctgaacgtggtgtctcactctgaaaagcaggaatgtaagatgatgaaagagacaatgtaatactgttggtccaaaagcatttaaaatcaatagatctgggattatgtggccttaggtagctggttgtacatctttccctaaatcgatccatgttaccacatagtagttttagtttaggattcagtaacagtgaagtgtttactatgtgcaagggtattgaagttcttatgaccacagatcatcagtactgttgtctcatgtaatgctaaaactgaaatggtccgtgtttgcattgttaaaaatgatgtgtgaaatagaatgagtgctatggtgttgaaaactgcagtgtccgttatgagtgccaaaaatctgtcttgaaggcagctacactt

SEQ ID NO: 251 - DNA, 545 bp, Homo sapiens
  misc_feature (1)..(545): 202429_s_at
gatgccctatctatctgctaaagcaaaaagtactaggctactaagtgcattttcatcacagaaaagagttgcatttgtattaacaagaaatttgtatacccacgcttcagctactatctaatcatcacccgaagatttaagatacaccaaatttcagtttgtttgtaacattgttcatctttagtgcactttgttttatataataaagtatgcctgttatattaaataataagaatatggcaattagcgatatagcatacccaaacaaagatgttctcgatacagtctggcaaagactatcccaaggttattttaatgaattcagacattttttcctgtggatatttctccatcctaaaaaaagtggcaaccaaggaaaatatttagatgcaacttactagagtgatgatgtgaaagaaatggtgattctggtatcatggtgtttattttctttcttataactgcagagaaaatatcctgactaaaaaaatttcatttttttggattcctttcttttacaaattgtgctgaggcaactatggcat

SEQ ID NO: 252 - DNA, 541 bp, Homo sapiens
  misc_feature (1)..(541): 202441_at
  misc_feature (412)..(412): n is a, c, g, or t
catgacagtttgttggttgtgccaaacactttatttgggaaaggaaagcccagatttgaatgggtctttcccctgggccttatcctatagaggcatttgtaatatggagaaaataatttttcatttttgctcatttaattctataaattctctttataaatgaattttgtgttctttagttctccttaaaagaacttttgaattataaaaataaaatctttacctgtcgaattgttgctgcagatgattgttgtggaaaatctggatcattgacctctgtgctttcattcctagagatgttttatagttacatgagcaaaagctgttgccccaaagtgatggccctggaggcggggctgaggaacagggaaatgccgctgtgaagtcttaaagcacttctgcttaaactccnatgtgtgaggagtgtgcctccctgtgccctctcagctctgaggctggccgtctttcggggtgttccttttggcaaatatacactgtaatcttgagtctaaatttatatgttgaaatgctacctttttta

SEQ ID NO: 253 - DNA, 530 bp, Homo sapiens
  misc_feature (1)..(530): 202444_s_at
cacacaaatatgccacctcaaacaagcacaagttgaccccggaatatctggagctcaaaaagtaccaggccattgcttctaacagtaagatctattttggcagcaacatccctaacatgttcgtggactcctcatgtgctttgaaatattcagatattaggactggaagagaaagctcactcccctctaaggaggctcttgaaccctctggagagaacgtcatccaaaacaaagagagcacaggttgatgcaagaggtggaaatgttctccatatcaagatgtggcccaaggggttaagtgggaacaatcattatacggactcttcagatttacagagaacttacacttcatctgttccacctctcctgcgatagtcctgggtgctccactgattggaggatagagccagctgtctgacacacaaatggtcttttcagccacagtcttatcaagtatcctatatgtattcctttctaaactgctactcatgaatgaggaaagtctgatgctaagatactgcctgcactgg

SEQ ID NO: 254 - DNA, 523 bp, Homo sapiens
  misc_feature (1)..(523): 202502_at
atgtctcttaagcaggtttggtttttattaaaatgatgtgttttctttagtaccactttacttgaattacattaacctagaaaactacataggttattttgatctcttaagattaatgtagcagaaatttcttggaattttatttttgtaatgacagaaaagtgggcttagaaagtattcaagatgttacaaaatttacatttagaaaatattgtagtatttgaatactgtcaacttgacagtaactttgtagacttaatggtattattaaagttctttttattgcagtttggaaagcatttgtgaaactttctgtttggcacagaaacagtcaaaattttgacattcatattctcctattttacagctacaagaactttcttgaaaatcttatttaattctgagcccatatttcacttaccttatttaaaataaatcaataaagcttgccttaaattatttttatatgactgttggtctctaggtagcctttggtctattgtacacaatctcatttcatatg

SEQ ID NO: 255 - DNA, 524 bp, Homo sapiens
  misc_feature (1)..(524): 202503_s_at
tggagaattctttaggttgtcccctaaagattctgaaaaagagaatcagattcctgaagaggcaggaagcagtggcttaggaaaagcaaagagaaaagcatgtcctttgcaacctgatcacacaaatgatgaaaaagaatagaactttctcattcatctttgaataacgtctccttgtttaccctggtattctagaatgtaaatttacataaatgtgtttgttccaattagctttgttgaacaggcatttaattaaaaaatttaggtttaaatttagatgttcaaaagtagttgtgaaatttgagaatttgtaagactaattatggtaacttagcttagtattcaatataatgcattgtttggtttcttttaccaaattaagtgtctagttcttgctaaaatcaagtcattgcattgtgttctaattacaagtatgttgtatttgagatttgcttagattgttgtactgctgccatttttattggtgtttgattattggaatggtgccatattgtcactccttc

SEQ ID NO: 256 - DNA, 438 bp, Homo sapiens
  misc_feature (1)..(438): 202518_at
  misc_feature (121)..(121): n is a, c, g, or t
  misc_feature (122)..(122): n is a, c, g, or t
accttctagaagagagcgtgcctcaggttacttgaacttgaacggagactgtagactcccggactttcccctaggactgggggccctgtaggctgctgttggaggactgggtagagacatnngaagggaagggcttttctccacacaagggcagagagtccgtctagatttcttcctgtcctgccagctctgcccatgcctgaggtggtcctacctctcacgggcaccctagctgctgacagccctttgtggccgccgtccccatcccctgccctcagcacacacatctgcacacacgcagctttgttctcacctctacctgtcattccagcatccctgcctcttgtcacaaactgccccagcaagaatttgaggttctgacaacagtacccatcccccacagtaccccttcagctcagtttctagaaagctcccttt

SEQ ID NO: 257 - DNA, 532 bp, Homo sapiens
  misc_feature (1)..(532): 202589_at
aaagctcaggattcttcgaaaagttgagaaaattgatgacttcaaagctgaagactttcagattgaagggtacaatccgcatccaactattaaaatggaaatggctgtttagggtgctttcaaaggagcttgaaggatattgtcagtctttaggggttgggctggatgccgaggtaaaagttctttttgctctaaaagaaaaaggaactaggtcaaaaatctgtccgtgacctatcagttattaatttttaaggatgttgccactggcaaatgtaactgtgccagttctttccataataaaaggctttgagttaactcactgagggtatctgacaatgctgaggttatgaacaaagtgaggagaatgaaatgtatgtgctcttagcaaaaacatgtatgtgcatttcaatcccacgtacttataaagaaggttggtgaatttcacaagctatttttggaatatttttagaatattttaagaatttcacaagctattccctcaaatctgagggagctgagtaacaccatcgat

SEQ ID NO: 258 - DNA, 429 bp, Homo sapiens
  misc_feature (1)..(429): 202637_s_at
aagacatatgccatgcagctacacctaccggccctgggacgccggaggacagggcattgtcctcagtcagatacaacagcatttggggccatggtacctgcacacctaaaacactaggccacgcatctgatctgtagtcacatgactaagccaagaggaaggagcaagactcaagacatgattgatggatgttaaagtctagcctgatgagaggggaagtggtgggggagacatagccccaccatgaggacatacaactgggaaatactgaaacttgctgcctattgggtatgctgaggccccacagacttacagaagaagtggccctccatagacatgtgtagcatcaaaacacaaaggcccacacttcctgacggatgccagcttgggcactgctgtctactgaccccaacccttgatgatatgtat

SEQ ID NO: 259 - DNA, 502 bp, Homo sapiens
  misc_feature (1)..(502): 202644_s_at
catcccatggtaccctggtattgggacagcaaaagccagtaaccatgagtatgaggaaatctctttctgttgctggcttacagtttctctgtgtgctttgtggttgctgtcatatttgctctagaagaaaaaaaaaaaaggaggggaaatgcattttccccagagataaaggctgccattttgggggtctgtacttatggcctgaaaatatttgtgatccataactctacacagcctttactcatactattaggcacactttccccttagagccccctaagtttttcccagacgaatctttataatttcctttccaaagataccaaataaacttcagtgttttcatctaattctcttaaagttgatatcttaatattttgtgttgatcattatttccattcttaatgtgaaaaaaagtaattatttatacttattataaaaagtatttgaaatttgcacatttaattgtccctaatagaaagccacctattctttgttggat

SEQ ID NO: 260 - DNA, 527 bp, Homo sapiens
  misc_feature (1)..(527): 202708_s_at
ggcaatggtagatccacccttatgcttgctcagtttagcataacctcttatggattttcatcaaattcagcgtgttggtcactggaaagagccttttccttctccttttcttactctcccctcatggtgttcccctcttaaaggaggaggagcttttaatttacacttaccacctcatttgcttttctggaggccatgcaatataggcgggactacagagttaatctcctttttacaaatgaggccaagagaagcctcattggttcacagtcatgcagctcatactgtccacccttgtattctcagatgcaggacaattgcattttagttttattttgtggaggtgcagaatatttactctttctgtccaacccttgattctgccgaggaagacactgatggtttgatgagtgattcagctgtttttggctaagggcttttggagctgatggcaggggtttgatgaatccaaatgagctctagacattatcacagactgaatagatcttaactgtctcctacatgtg

SEQ ID NO: 261 - DNA, 578 bp, Homo sapiens
  misc_feature (1)..(578): 202723_s_at
acgtcatgatgggccctaattcggtcatgtcaacctatggcagccaggcatctcataacaaaatgatgaatcccagctcccatacccaccctggacatgctcagcagacatctgcagttaacgggcgtcccctgccccacacggtaagcaccatgccccacacctcgggtatgaaccgcctgacccaagtgaagacacctgtacaagtgcctctgccccaccccatgcagatgagtgccctggggggctactcctccgtgagcagctgcaatggctatggcagaatgggccttctccaccaggagaagctcccaagtgacttggatggcatgttcattgagcgcttagactgtgacatggaatccatcattcggaatgacctcatggatggagatacattggattttaactttgacaatgtgttgcccaaccaaagcttcccacacagtgtcaagacaacgacacatagctgggtgtcaggctgagggttagtgagcaggttacacttaaaagtacttcagattgtctgacagcaggaactgagagaagcagtccaaagatgtctttcaccaactccc

SEQ ID NO: 262 - DNA, 476 bp, Homo sapiens
  misc_feature (1)..(476): 202724_s_at
gagcagtaaatcaatggaacatcccaagaagaggataaggatgcttaaaatggaaatcattctccaacgatatacaaattggacttgttcaactgctggatatatgctaccaataaccccagccccaacttaaaattcttacattcaagctcctaagagttcttaatttataactaattttaaaagagaagtttcttttctggttttagtttgggaataatcattcattaaaaaaaatgtattgtggtttatgcgaacagaccaacctggcattacagttggcctctccttgaggtgggcacagcctggcagtgtggccaggggtggccatgtaagtcccatcaggacgtagtcatgcctcctgcatttcgctacccgagtttagtaacagtgcagattccacgttcttgttccgatactctgagaagtgcctgatgttgatgtacttacagacacaagaacaatctttgctataa

SEQ ID NO: 263 - DNA, 507 bp, Homo sapiens
  misc_feature (1)..(507): 202741_at
gtaagattcctcctaactttcacagtcgatgacaagattgtctttttatctgatattttgaagggtatattgctttgaagtaagtctcaataaggcaatatattttagggcatctttcttcttatctctgacagtgttcttaaaattatttgaatatcataagagccttggtgtctgtcctaattcctttctcactcaccgatgctgaatacccagttgaatcaaactgtcaacctaccaaaaacgatattgtggcttatgggtattgctgtctcattcttggtatattcttgtgttaactgcccattggcctgaaaatactcattgtaagcctgaaaaaaaaaatctttcccactgttttttctgcttgttgtaagaatcaaatgaaataatgtatgtgaaagcaccttgtaaactgtaacctatcaatgtaaaatgttaaggtgtgttgttatttcattaattacttctttgtttagaatggaatttcctatgcactactgtagc

SEQ ID NO: 264 - DNA, 450 bp, Homo sapiens
  misc_feature (1)..(450): 202742_s_at
tacacttttttttgccaactgacttaacaacattgctgtcaggtggaaatttcaagcacttttgcacatttagttcagtgtttgttgagaatccatggcttaacccacttgttttgctatttttttctttgcttttaattttccccatctgattttatctctgcgtttcagtgacctaccttaaaacaacacacgagaagagttaaactgggttcattttaatgatcaatttacctgcatataaaatttatttttaatcaagctgatcttaatgtatataatcattctatttgctttattatcggtgcaggtaggtcattaacaccacttcttttcatctgtaccacaccctggtgaaacctttgaagacataaaaaaaacctgtctgagatgttctttctaccaatctatatgtctttcggttatcaagtgtttctgcatggtaatgtc

SEQ ID NO: 265 - DNA, 487 bp, Homo sapiens
  misc_feature (1)..(487): 202782_s_at
ggaaggatccaggttcgcttccgttggtagcttgagtcccatgcctccaccctgccatctgaggaaggggtgacaagtggtcaaggagctgtggccacagacttttccagggtggtccttggcaggtgaggtgcgtctgtcccacccttgtcaggagccattgacgacgggccccccctggaccccccgggacctcagagtgggggcaggcagaagggagaaccagctcaagacattttggaggatctggccctggggttcttcagagaacaccctctaggggctttggggacatggcctgtccccacatccagcacttgcctccgccatggtcactcggcagcccttttcccaggagaagacacctctgggagcctgctcagtgcttgtcctgccatcctgtgtcctgggactgagggttactccagttgctctgtgttgcatactctcccccgcaagcctgtgtatgaagaattgtcccctggct

SEQ ID NO: 266 - DNA, 224 bp, Homo sapiens
  misc_feature (1)..(224): 202833_s_at
gaagcgtttaggcatgtttaacatccagcactgtaagaagctgtccagctgggtactgctaatgaaatacctgggcaatgccaccgccatcttcttcctacctgatgaggggaaactacagcacctggaaaatgaactcacccacgatatcatcaccaagttcctggaaaatgaagacagaaggtctgccagcttacatttacccaaactgtccattactggaa

SEQ ID NO: 267 - DNA, 447 bp, Homo sapiens
  misc_feature (1)..(447): 202842_s_at
gtttgatatttaccacagcgctgtgcctttctacagtagaactggggtaaaggaaatggttttattgcccatagtcatttaggctggaaaaaagttgaaaacttaacgaaatattgccaagagattgttatgtgtttggttccagcctaaaaatgattttgtagtgttgaaatcatagctacttacatagctttttcatatttctttcttagttgttggcactcttaggtcttagtatggatttatgtgtttgtgtgtgtgtagtttatcctctctctcatctttatctagagattgactgatacctcattctgtttgtaaaaccagccagtaatttctgtgcaaccttactatgtgcaatatttttaaatcctgagaaatgtgtgcttttgttttcggatagacttatttctttagttctgcacttttccacattatactccatat

SEQ ID NO: 268 - DNA, 493 bp, Homo sapiens
  misc_feature (1)..(493): 202845_s_at
ctgcaggcgcactctgtcagagtgaacagcaccgcgagacaggccaggctcgtggctcggaagacaaaccccacacacactcaaggggtcgaaaacaaaccccacacgagggctctcacctccttctcctaggtagtatttattttcagcacctgtttgatgcagtttttaatcctctacctattgcactgttgtgactcgttggccattatttgattttggtacgaaaaaaagctttgttatagaaatcagcatactatttttttaaatctggagagaagatattctggtgactgaaagtatggtcgggtgtcagatataaatgtgcaaatgccttcttgctgtcctgtcggtctcagtacgttcactttatagctgctggcaatatcgaaggttccttttttgtttgtgtaaactctaatttctatcaaggtgtcatggatttttaaaattagtatttcattacaaatgtctcagcattggttaactaatt

SEQ ID NO: 269 - DNA, 519 bp, Homo sapiens
  misc_feature (1)..(519): 202854_at
tggagtcctattgacatcgccagtaaaattatcaatgttctagttctgtggccatctgcttagtagagctttttgcatgtatcttctaagaattttatctgttttgtactttagaaatgtcagttgctgcattcctaaactgtttatttgcactatgagcctatagactatcagttccctttgggcggattgttgtttaacttgtaaatgaaaaaattctcttaaaccacagcactattgagtgaaacattgaactcatatctgtaagaaataaagagaagatatattagttttttaattggtattttaatttttatatatgcaggaaagaatagaagtgattgaatattgttaattataccaccgtgtgttagaaaagtaagaagcagtcaattttcacatcaaagacagcatctaagaagttttgttctgtcctggaattattttagtagtgtttcagtaatgttgactgtattttccaacttgttcaaattattaccagtgaatctttgtcagcag

SEQ ID NO: 270 - DNA, 542 bp, Homo sapiens
  misc_feature (1)..(542): 202861_at
ctccattctgggaccatctccaggagtccatgagaggctttcttctcctatgtcccaattctcagaactcagatgtggctagaccaaccagtgggaaactgccccagcttctcccaccatagggggccggacccccatcaccagcctaggatccaggggctgcctctggcctcttagggagcagagagcagaactccgcagcccagcccagaggagtgtcacctcccacctttggagaggaatccttccctcccctggacaaagttgctgacaagctgctgaagtggcctctccatattccagctgagcctgaatctgactcttgagggttggggctgcacttatttattgcggggagacagctctctctcccacctcctccccagatgggaggagagcctgaggcccaagcaggacccgggggttccagcccctagctgctctggagtgggggaggttggtggaccatggagtccctggtgctgcccctcaggtgggacccaggggttctcagctgtaccctctgccgatggcatttgtgt

SEQ ID NO: 271 - DNA, 330 bp, Homo sapiens
  misc_feature (1)..(330): 202862_at
agccctacacatttgacatcaacctctctgttaacctgaaaggagaaggaatgagccaggcggctaccatatgcaagtccaattttaagtacatgtactggacgatgctgcagcagctcactcaccactctgtcaacggctgcaacctgcggccgggggacctcctggcttctgggaccatcagcgggccggagccagaaaacttcggctccatgttggaactgtcgtggaagggaacgaagcccatagacctggggaatggtcagaccaggaagtttctgctggacggggatgaagtcatcataacagggtactgccagggggatggtt

SEQ ID NO: 272 - DNA, 481 bp, Homo sapiens
  misc_feature (1)..(481): 202868_s_at
gttatccccaagctaaactgcgtgttcactgtggaaaccgatggctttatttcctacatttacgggagcaaattccagcttcggtcaagtgaacggtctgcgaagaagttcaaagcgaagggaacgattgacctgtgaattctttgccgtctaaggcagttgtttatgacagctgaaaactggacactccctaaatgtccacctttcagtgaagagatagttaagccaattccatttatagaccacctccagccagtgacgctccgagttgaggatgttgaacaacatgggaaggtcgcagcgtactaagtgaagaagtcagaggacagaggaatttctctttctaggagattttcattttgtgtgactcccatggggaggaacagactggcaggaagcacaccggggttaacactggttgacttgaataggattattcgatttttaaaaatacttttccatgttttctgagtgctctatg

SEQ ID NO: 273 - DNA, 531 bp, Homo sapiens
  misc_feature (1)..(531): 202880_s_at
cctttagggttggcgagcatctctggaaatagcttttgcagaggagtggtgggaggaatagagggggacagtctgtcacctccctccccgccactttgtgtagatcctacctggagggaatggctttaggcacttttgtgccagagcttgtgagggtgacagaagagggtccaggctggaaacctgaactttctgggtgggagaaccaggtggtgcctgccgaggtctgggcgtgtttgggccggtgctggagcctgtccagctggcccgggccctggcctggttctcaagtgtttcctagacagagaggcacctgggtcagtattagtctatttatcagaggtgtaaataatctatgtatagtttttctccttttagattattttgtatttgtttaaaagaagttttgtcaaaatacaaaaatataaagaaatgactgaaagttgttgacagggtttttaagaaataattattctaattgtttttgtttgtttgtttttgccttgtaaactagcgccaaggaactgcagc

SEQ ID NO: 274 - DNA, 405 bp, Homo sapiens
  misc_feature (1)..(405): 202928_s_at
cacagacatccctaaaagtgccccccactcgatgactgcctcatcttcctcagtttcatccccatccccaggtcttcctagacgctcagcacccccttctcccctgtgccgtagtttgtctcctgggactgggggaggagtccgaggtggggttggttacctgtcccgaggggaccctgtccgggtccttgctcggagagtacggcctgatggctctgtgcagtacctggttgagtggggaggagggggcatcttctgaacagcctgcctctgcccagctccccattcacacacaccggcactttcataccctgacctctgacctcacctacagctgggatgtacctggagagatagggggtagttctccctactgcccaggctggaatccaagagtggggagtg

SEQ ID NO: 275 - DNA, 377 bp, Homo sapiens
  misc_feature (1)..(377): 202929_s_at
ccgttcctggagctggacacgaatttgcccgccaaccgagtgcccgcggggctggagaaacgactctgcgccgccgctgcctccatcctgggcaaacctgcggaccgcgtgaacgtgacggtacggccgggcctggccatggcgctgagcgggtccaccgagccctgcgcgcagctgtccatctcctccatcggcgtagtgggcaccgcggaggacaaccgcagccacagcgcccacttctttgagtttctcaccaaggagctagccctgggccaggaccggatacttatccgctttttccccttggagtcctggcagattggcaagatagggacggtcatgacttttttatgattgggcacggagggatccagggc

SEQ ID NO: 276 - DNA, 480 bp, Homo sapiens
  misc_feature (1)..(480): 202969_at
  misc_feature (111)..(111): n is a, c, g, or t
  misc_feature (131)..(131): n is a, c, g, or t
  misc_feature (132)..(132): n is a, c, g, or t
  misc_feature (137)..(137): n is a, c, g, or t
  misc_feature (138)..(138): n is a, c, g, or t
  misc_feature (140)..(140): n is a, c, g, or t
  misc_feature (141)..(141): n is a, c, g, or t
  misc_feature (266)..(266): n is a, c, g, or t
  misc_feature (419)..(419): n is a, c, g, or t
  misc_feature (420)..(420): n is a, c, g, or t
cattgggccatattggaatcctaaagtgtgaattattttaaggagagcattcatttttgtaatttttttcatcaaaaatatttctggtaagcagaagactttttaaaaaanctgatctggtctcggtaaannttttnntnntgcccaacataatgctgtaatagcattaaaaaaagtatttgtgaactctgtttcttaggggcttgtacatctctctgctatggacatacataaaattaattgtaattatactcagctcaactgcntacagttctgtctaggcagtggcttgggtttttatcgagcaacaacttagacacgtgactgtaatatgctgcaactgtgtgtactgaaaatatgtgaaaatggttgaatgtggactgtgtatatatgtatgtaaaaatttctgtgagatgctnntgtcgccacttaacattaaatatgttctagtggattttaatcctagtggccagttctatg

SEQ ID NO: 277 - DNA, 394 bp, Homo sapiens
  misc_feature (1)..(394): 202974_at
gtgcagttctccacagtgggtgcctgtctcctgggtttactaagcttgtagaatgggggaacccactgtatgcccctctccagcatttggaattccacccgccttgctttaagacaaacagggctgctccaactagttttgtgtcagcttccagctctctgcagctatcctaattcagccagtaaggttcagtcttcttgctcaggctcctgaagggttgattctcctgatagatggggccccactgatctggatttgaaaaggatttctagaaattgggggtaagaagtactaccaaaatgtaactgctaatcaagggtgatgcacagcaaaagcaatggaccccatccctctaaagcctgccctcctttgccttcaactgtatatgctgggt

SEQ ID NO: 278 - DNA, 470 bp, Homo sapiens
  misc_feature (1)..(470): 202988_s_at
gtgaacagcttggccttttttgggtgtcttgacaggccaagaagaacaaatgactcagaaccggattaacatgaaagttatccaggcgcagagttgaagaagcataagcaagcaagacaaaaacagagagaccgcaaggaggaagatctgtggtactgtcataaaaaacagtggagctctgtattagaaaagcccctcagaactgggaaggccaggtaactctagttacacagaaactggtactaaagtctatcaaactgattacacagactgtaagaattcaaagtcaactgacatctatgctacatatattatatagtttgtacttgactatgagccattaacttaaagcatatgtttcaaatagccattgctactattccttgtccggtgtaattttattttattgtttttactttggaagagatgaactgtgtatttaacttaagctattgctcttaaaaccaggg

SEQ ID NO: 279 - DNA, 510 bp, Homo sapiens
  misc_feature (1)..(510): 202990_at
agagcagatttccactgcaggcaccgaagcctcggggacaggcaatatgaagttcatgctaaatggggccctaactatcgggaccatggatggggccaatgtggaaatggcagaagaagctggggaagagaacctgttcatctttggcatgaggatagatgatgtggctgctttggacaagaaagggtacgaggcaaaagaatactatgaggcacttccagagctgaagctggtcattgatcaaattgacaatggctttttttctcccaagcagcctgacctcttcaaagatatcatcaacatgctattttatcatgacaggtttaaagtctttgcagactacgaagcctatgtcaagtgtcaagataaagtgagtcagctgtacatgaatccaaaggcctggaacacaatggtactcaaaaacatagctgcctcggggaaattctccagtgaccgaacaattaaagaatatgcccaaaacatctggaacgtggaaccttcagatctaaa

SEQ ID NO: 280 - DNA, 551 bp, Homo sapiens
  misc_feature (1)..(551): 203021_at
tcctgccttcaccatgaagtccagcggcctcttccccttcctggtgctgcttgccctgggaactctggcaccttgggctgtggaaggctctggaaagtccttcaaagctggagtctgtcctcctaagaaatctgcccagtgccttagatacaagaaacctgagtgccagagtgactggcagtgtccagggaagaagagatgttgtcctgacacttgtggcatcaaatgcctggatcctgttgacaccccaaacccaacaaggaggaagcctgggaagtgcccagtgacttatggccaatgtttgatgcttaacccccccaatttctgtgagatggatggccagtgcaagcgtgacttgaagtgttgcatgggcatgtgtgggaaatcctgcgtttcccctgtgaaagcttgattcctgccatatggaggaggctctggagtcctgctctgtgtggtccaggtcctttccaccctgagacttggctccaccactgatatcctcctttggggaaaggcttggcacacagcaggctttcaagaagtgccagttg

SEQ ID NO: 281 - DNA, 375 bp, Homo sapiens
  misc_feature (1)..(375): 203045_at
gcagagacctgtgcccagagaagggtctcgacccactcaaggacacacagcaggtccgtggatgggctggatgagtgaccagggccagcctctgtctcaggacattccagaaggacaaggagatgtctctccctctcccaaagcaccagcgtccctgcctcccgtgggccctgtccgggttgcccctggtgaccccagcctctgtccacttcctaacccagggaccctgcacagccagaactgcctttggccctacggatggccactggctctggtctaaagtgcctgggcttggtggccatcaagagggagccagtcaggcctgtgagggccgtagaccttgtatataccctgcaccagcagtgaccgggcaga

SEQ ID NO: 282 - DNA, 561 bp, Homo sapiens
  misc_feature (1)..(561): 203066_at
ttcagttgctaatgaggctcctccgctctggacacaacccttttatagattaatttctctgccaattaacttgtcattttcagtacatattttactattccacaccaaccataattacaacaagggatttttcttatgcactcctatgcatgtgaataacatgtggtgtaattctgcttcttacagaagtattactgaaggtattatttccaatattatttggtttattatgcggatcttttttatatatgcagtcccatcccttctgtgccactcaatgccatccagacatggtttttccctccaggggcctttctctccagagggcacttcggctgcctctgcttcctctcattcgaggcccggctcttgctgacagaataggttccgttctgggcggtggttctcgagcctgccattcaaaaccaaagcaaattggagcatttctcacaacatggtattgaagttcctttttgttctcaaaagttgtgaccgtgttaaattgtactcccttagtcctgtaaggtatgttaagtgaatcgcagttacgctgtactttta

SEQ ID NO: 283 - DNA, 550 bp, Homo sapiens
  misc_feature (1)..(550): 203073_at
gatcccgaggttagattcttaagcaagagaagagttggacttccaggctgaaggggagaaagtgactctgttctcttagcaaccgtctgtagcaaagaagtgcttccagcatcactccagcaacacgcccatgcgtcttctctcagcgtatttgggtcttctttgcccaaaagaacacaaaagcctttttccattgtatggaagatagtttttaagacatttgaaactttctactatagtttacagaacaaattattttatttttattgtaaatcttagtgtggaagagctgatttctaaaatatgattaaagtaaatatatacctatgaatatcaagagtcgtctccctgagcctgtagttggaagtgacgactgtaatggaatgatgtcttgtatagaaatgcccttctctgaaataaagagaactcctgggctttctaaagaggctgcgggaagccatcctccactcccactgtgtgtgagagcagtgcttctgatcctgctgtcaccccgacctctggcaggagccggcgccagtaggaaagacct

SEQ ID NO: 284 - DNA, 86 bp, Homo sapiens
  misc_feature (1)..(86): 203089_s_at
catccttgctgaactacagcttcgagaaccaagctttcccgatgttcagcatggtgtactcatccataaagtcatcctgggctccc

SEQ ID NO: 285 - DNA, 498 bp, Homo sapiens
  misc_feature (1)..(498): 203091_at
gccccagctggacaggttgattataccaaggcttgggaagagtactacaagaaaatgggtcaggcagttcctgctccgactggggctcctccaggtggtcagccagattatagtgcagcctgggctgagcattatagacaacaagcagcctattatgcccagacaagtccccagggaatgccacagcatcctccagcacctcagggccaataataagaagtggacaatacagtatttgcttcattgtgtgggggaaaaaaacctttgttaaatatatggatgcagacgacttgatgaagatcttaattttgtttttggtttaaaatagtgtttccttttttttttttttttttttgaaaatgtacaaaatatctatcactactgataggaggttaatatttctgtgtagaaatgaaaattggtttgtttttagtatttagtgtagatgtacacattccagcaaatgtatttgcaattatgtggttgatgctttgtgat

SEQ ID NO: 286 - DNA, 466 bp, Homo sapiens
  misc_feature (1)..(466): 203103_s_at
ttcgggcatcacgccaagttcatcgcttcaacaggcatggacagaagcctcaagttctacagcctgtaggccctggcccttctgatggaagctgggcctcatctcagtagaggggtagaattagggtttggggggggggtggggggaatctatggggggagggggctctgtggggtgggacattcacatcatttcactctggtctgagtggtggcctgagaaccatggtggcatggaccaccctcatccatgcaactccaggccccatgggaacggatgtggaaggaagaactgtcaccctcttaaggcccagggtcggagcccagggcctctcccttcctgtcgttcaatggacgtggtggtggctgttccacacccattttgttgcagttcctgtgagacaggagaggctgagccaagggaactgtgaaggggatgggcaggagggcttgtgcagggttttgta

SEQ ID NO: 287 - DNA, 504 bp, Homo sapiens
  misc_feature (1)..(504): 203234_at
tccgcattggcacttctggtgggataggtctggagcccggcactgtggtcataacagagcaggcagtggatacctgcttcaaggcagagtttgagcagattgtcctggggaagcgggtcatccggaaaacggaccttaacaagaagctggtgcaggagctgttgctgtgttctgcagagctgagcgagttcaccacagtggtggggaacaccatgtgcaccttggacttctatgaagggcaaggccgtctggatggggctctctgctcctacacggagaaggacaagcaggcgtatctggaggcagcctatgcagccggcgtccgcaatatcgagatggagtcctcggtgtttgccgccatgtgcagcgcctgcggcctccaagcggccgtggtgtgtgtcaccctcctgaaccgcctggaaggggaccagatcagcagccctcgcaatgtgctcagcgagtaccagcagaggccgcagcggctggtgagctacttcatcaaga

SEQ ID NO: 288 - DNA, 521 bp, Homo sapiens
  misc_feature (1)..(521): 203253_s_at
gggatattgaaatcattgcgctgtgatttcatctgtgatgtgaaaaatcaatttattatccttggtgctttcccccccaccaatgcacaaataattgtgaacagcttgaaatgacttaaactgtaatccaaatgggacaatctgataagaatttcatgcattggtagttaaataacttaaattgctaaagctttagcttgaaatttatgtttagaaaaactattgatttcccatggtatgaatataactattgtaattcttcaaatgagactcttctcaccttaaatagtcatatattaattaacttataggaaataagcatactatatgttagctgttttaaaaggtaccagatgtaagagtcataaatatatgcaattaaagaagttcatagatttcacacgaatgtaaatgtgttatatggagacatgtcttgtaaacagttgaatgtatgtaagttttctgtttgtgaaaatgtagttaatgtactcactgtggaggtcataaggaagctacttttt

SEQ ID NO: 289 - DNA, 469 bp, Homo sapiens
  misc_feature (1)..(469): 203271_s_at
tctgggctgggagctgtgacctccccaacgctcacccctcaaccccaagtcctctgcttggggagttctccaggagctccggaccctgagtcaatgttgggaggaagggtacctggtgtccccagtcaagcccatgaagcccatgcggcctgctacatggggtggggtcgtagggaggctgtttgcctccacgtctaggaaggcctgtgagaggagcagtcaggacttccggacaacttagctgggccctacttgggcccaagtttcagaatagtgttcccctatcaaggctgtgactagatcaggcagggatccattccctgtcccctgcccactaccttcaggccatttagagttgtaaatttacaaagatccacggtgggctccagctgccaagccacccaagggagtctgggccctaggcctagccccatccctccccatgaggggccaagacactgcctaaggt

SEQ ID NO: 290 - DNA, 391 bp, Homo sapiens
  misc_feature (1)..(391): 203320_at
cccttccttcatctgacttattgaacttttacaaactaacagtcaccagcaccaaagaattaagtcaactaacctgccttgaattttaaaccagcaatccatatggctttatctggtataaatcttctgcctttgatcatttctggaccgtaggaaaaaggaatagcaatcattaaaatcttgggccagagaacactatttttacataacagtttcttaacctaaagtcaaggccttggactcttccctgagggttgcctgaaattccttcatgctttctattcaggactaattcccttactgcaaatgtgttagctctaacatctcccacaagctaaaggaacttgcaagtatattaacaaggacacatctgacatcctgtgtttggtta

SEQ ID NO: 291 - DNA, 516 bp, Homo sapiens
  misc_feature (1)..(516): 203334_at
ggtctcagacccaactaagctaagcaaacagaagaagcaacagcgtcttgaacccttgtacaaccgctatgaggaacccaatgcctggagaatatctcgagctttccgacggcgctgaaaggcaagattgttcctttgcctctccagcagcagtagccagggcttggacttatcgatgacaggctggtcctgaggatacagctgtcccgtgactgactgtcttaactgagcattttctcaactcgactctcatttcttccctgctggtaaaatagaaacagggatttaaacctggctttggcaagagcctgcagcctccatcaccccaagtccttgggcccagttgggagctcatatctaacacagagacacattgcatcaacttcaagaaagggacaatttgtgcagctccaggatgggaaggtggagtgggtgagcatcttgtgcagggacatggtgagtgccctgatgccccagctagcaggagctactgtgctcatctaaagtgtttgcccc

SEQ ID NO: 292 - DNA, 401 bp, Homo sapiens
  misc_feature (1)..(401): 203341_at
aacttggtaacctggatgacgatgaagtttctttaggaagtatggatgatgaagaatttgctgaagttgatgaagatggaggaacattcatggatgtgttagatgatgaaagtgagagcgttccagaacttgaagtccactccaaagtcagtactaagaaaagcaagagaaaaggtacagatgattttgactttgctggctcatttcaagggccaagaaaaaagaaaagaaacttaaatgattccagcctatttgtatctgctgaagagtttggccatctattggatgaaaatatgggatccaagtttgataacattgcatgaatgccatggctaacaaagataatgcaagtctcaaacagcttagatgggaggctgaacgtgatgactggctacacaaca

SEQ ID NO: 293 - DNA, 460 bp, Homo sapiens
  misc_feature (1)..(460): 203411_s_at
ggggcagcgtcaccaaaaagcgcaaactggagtccactgagagccgcagcagcttctcacagcacgcacgcactagcgggcgcgtggccgtggaggaggtggatgaggagggcaagtttgtccggctgcgcaacaagtccaatgaggaccagtccatgggcaattggcagatcaagcgccagaatggagatgatcccttgctgacttaccggttcccaccaaagttcaccctgaaggctgggcaggtggtgacgatctgggctgcaggagctggggccacccacagcccccctaccgacctggtgtggaaggcacagaacacctggggctgcgggaacagcctgcgtacggctctcatcaactccactggggaagaagtggccatgcgcaagctggtgcgctcagtgactgtggttgaggacgacgaggatgaggatggagatgacctgctccatcacca

SEQ ID NO: 294 - DNA, 524 bp, Homo sapiens
  misc_feature (1)..(524): 203414_at
gagttatatcctggctcagtggagtgatatttatgtattatttttacttttctctcagtgtcttatattaagattaacatgttgttaatagttgctttgttgattaatctctcttgttggtgttttaataaatgaaataggcttgcctttagatcgggtgctgatattgcctgtttcctagtaatgggctgatcaaatgatcagtggaattcttggtttgatgataaccttattaattgaaattttttactgatgtggctttaaaagaggtttattttgtatatgtttagaactctctgattttgatgaattatatgggagtgagaaacagaagaagtggtatttgctggcgagttaaataggcaaggtacccagtgataacaccaaccaaaccactcctatctgcatgattctgaacatctggatgcctgttgttttactgtgtatattttatttttaatatattaactttgtggattcatttaaggtctactcaaaagtaacactgtccaaaccactaatat

SEQ ID NO: 295 - DNA, 501 bp, Homo sapiens
  misc_feature (1)..(501): 203502_at
tatgagttagctttcttgctagccccctagtcggtcaccaaactagtaactagtggggcttaatgaaggtcataagtttctgagatgggagagcaacaagtagagatgaagttaaaggtatttatcattcaagaaatcattattgagtcaccaattgacaggcactattctaatcagtagttcactttaatatttaataagattttctgggataacagtaagggatattagataatataccgtatgtatttattactagtcttttcctctaggaaaagggatactttgataattaaggccagaggcccattagttgagaaagtcacagatatatttctccaagaaagccaacaaccaccaccacaatgacagaaatgacaacaaggccctttaacttgtcttctagtttagagacatccttcatttgacatttagtagaattcctctttggccacaagaataagcagcaaataaacaactatggctgttgaggttctcatt

SEQ ID NO: 296 - DNA, 558 bp, Homo sapiens
  misc_feature (1)..(558): 203543_s_at
gtggcttttgtcaagcacttagatggatataaatgcagcaacttgttttaaaaaaatgcacatttacttcccaaaaaagttgttacttgccttttcaagtgtgacaaactcacatttgatattctcttatatgttatagtaatgtaacgtataaactcaagcctttttattctttgtgattaaatcctgttttaaaatgtcacaaaacaggaaccagcattctaattagatttactatatcaagatatggttcaaataggactactagagttcattgaacactaaaactatgaaacaattactttttatattaaaaagaccatggatttaacttatgaaaatccaaatgcaggatagtaatttttgtttacttttttaaccaaactgaatttttgaaagactattgcaggtgtttaaaaagaaagaaaagttgttttatctaatactgtaagtagttgtcatattctggaaaatttaatagttttagagttaagatatctcctctctttggttagggaagaagaaagcccttcaccattgtggaatgatgccctggct

SEQ ID NO: 297 - DNA, 526 bp, Homo sapiens
  misc_feature (1)..(526): 203547_at
  misc_feature (115)..(115): n is a, c, g, or t
  misc_feature (130)..(130): n is a, c, g, or t
  misc_feature (254)..(254): n is a, c, g, or t
gggaagggtccatctcagagaatttacgagcagggatgaaggcctccctgtctaaaatccctccttcatcccccgctggtggcagaatctgttaccagaggacaaagcctttggntcttctaatcagagngcaagctgggagcacaggcactgcaggagagaatgcccagtgaccagtcactgaccctgtgcagaacctcctggaagcgagctttgctgggagagggggtagctagcctgagagggaaccctcnaagggacctcaaaggtgattgtgccaggctctgcgcctgccccacaccctcccttaccctcctccagaccattcaggacacagggaaatcagggttacaaatcttcttgatccacttctctcaggatcccctctcttcctacccttcctcaccacttccctcagtcccaactccttttccctatttccttctcctcctgtctttaaagcctgcctcttccaggaagacccccctattgctgctggggctccccatttgcttactttgcattt

SEQ ID NO: 298 - DNA, 555 bp, Homo sapiens
  misc_feature (1)..(555): 203555_at
gactcctaaccaaccagatggactgccagacaggcagacatcagtccacatggaatcctgacatcccagccagccggccagactctcatcttgatgtcttgatggatggaccccagctagtcagacatgatcctccagattgacagacaagtcccccaaatgagtacacatctccagctattcagacagatggagccccagcaaatcaggacctatctaggcagaccccagccagacccccgccagacagactcccaaccagactgaccccttgctgttcacacagcctgccgagtagctgggactacaggtctaattttttttttttttaagaaatgagtttttgccatgttgcccagactggtcttgaactcccaacctcaagcaatcctcctgcctcagcctcccaaagtgctgagattacaggtgtgagccaccaggctcagccccctaagatttgaaacactttaaatggcccatggtagggttcctgctaggataaaacattaagtggctgttaaaagaaataaaaggaggacacgtctctgtgcaaaa

SEQ ID NO: 299 - DNA, 464 bp, Homo sapiens
  misc_feature (1)..(464): 203560_at
tatggtgtccagtggcatccagagaaagcaccttatgagtggaagaatttggatggcatttcccatgcacctaatgctgtgaaaaccgcattttatttagcagagttttttgttaatgaagctcggaaaaacaaccatcattttaaatctgaatctgaagaggagaaagcattgatttatcagttcagtccaatttatactggaaatatttcttcatttcagcaatgttacatatttgattgaaagtcttcaatttgttaacagagcaaatttgaataattccatgattaaactgttagaataacttgctactcatggcaagattaggaagtcacagattcttttctataatgtgcctggctctgattcttcattatgtatgtgactatttatataacattagataattaaatagtgagacataaatagagtgctttttcatggaaaagccttcttatatctga

SEQ ID NO: 300 - DNA, 539 bp, Homo sapiens
  misc_feature (1)..(539): 203588_s_at
tctaccattcagctgccattcataatcatcaatacaagcagaaaaacagtcatagattgcagcatctccagtgacaagtttgagtatcttttcaattttgacaacacctttgagatccatgatgacatagaagtactaaagcggatgggaatgtcgtttggcctggagtcaggcaaatgctctctggaggatctgaaacttgcgaaatccctggtgccaaaggctttagaaggttatatcacagatatctccacaggaccttcttggttaaatcagggactacttctgaactctacccaatcagtttcaaatttagacctgaccactggtgccaccttaccccagtcaagtgtaaaccaagggttatgcttggatgcagaagtggccttagcaactgggcagttcctggccccaaacagtcaccagtccagcagtgcggcctctcactgctccgagtcccgaggcgagaccccctgttcgttcaatgatgaagatgaggaagatgatgaggaggattcctcctccccagaataaagaca

SEQ ID NO: 301 - DNA, 484 bp, Homo sapiens
  misc_feature (1)..(484): 203661_s_at
gcttcgggcatccaacgcaatgatgaacaacaatgaccttgtgaggaagaggaggcttgcggacctgactgggcccatcattcccaagtgccggagtggtgtctagtgtgtggcggtggagtccatgcctttgaactggatgtgttctattgatgacctgtgctctgcaggggaaaccagaaggcaaaatgctggcagcatgaaacccttttgtggttcagttctttatgcactaaggttttaggttgactagtggttgtagttgaaaattttataaaataccgttaatgtgaagtttttctttagtcacagaagttgaatctggttattatttaaaaactagaagcccccaaaccagcagatcttactgaagatgatgttccagcagcagcgacttagccccaggagcccagtttcaatggccttgctgtgtggtgtttcaagtgcatttaaaatgtgtgacacagaaacggcacactcttcc

SEQ ID NO: 302 - DNA, 504 bp, Homo sapiens
  misc_feature (1)..(504): 203662_s_at
agacaaattgctgctgaccttacgcctgtatattaagcctccgcaggatgccggacaatggtgaagaaactccagatatcaaggaattgggaaatcctggccaaaccaccccaagatgattacactgaaatgtagtattagtactgctgccagatctctttttaacatcatgtgcgtctcttgggatccagcaaaagtgttaagccacaatgcccttgtgccttttaatataccacagtgccagttaaactaatatttttgtttgttgcttttgggagttattttcattagtgatttcagcaaatctcatgataaaggacaaggtcaagaactccagagcactgagcagagaggctggtgatgaaaaggtgaaggcctgcgcactgaactgtaaggcagtgggcagtacagggtaactggaggcggggccagggcctcagcgctatggaagagtgtccactgaggctgcacatggcccaggagtggcaccatgttgcagggaca

SEQ ID NO: 303 - DNA, 511 bp, Homo sapiens
  misc_feature (1)..(511): 203688_at
  misc_feature (424)..(424): n is a, c, g, or t
  misc_feature (441)..(441): n is a, c, g, or t
  misc_feature (450)..(450): n is a, c, g, or t
gaatgtcagtccaatctccaatgagaacatgagcaaatagacctttccaggttgaaagtgaaacatactgggtttctgtaagtttttcctcatggcttcatctctatctttactttctcttgaatatgctacacaaagttctttattactacatactaaagtttgcattccagggatattgactgtacatatttatgtatatgtaccatgttgttacatgtaaacaaacttcaatttgaagtgcagctattatgtggtatccatgtgtatcgaccatgtgccatatatcaattatggtcactagaaagtctctttatgatactttttattgtactgtttttcatttcacttgcaaaattttgcagaattcctcctttctacccataaattacatataatttttcttctttagtcatggagaacncccccccatcatctcanccctattanctttcccatgtgtactggtattattaaaaagacatttacatacgcaagtttttcactgaca

SEQ ID NO: 304 - DNA, 208 bp, Homo sapiens
  misc_feature (1)..(208): 203708_at
gtatagcttgataggggcaggggcaatgggatgtagtttttacccaggttctatccaaatctatgtgggcatgagttgggttataactggatcctactatcattgtggctttggttcaaaaggaaacactacatttgctcacagatgattcttctgattcttctgaatgctcccgaactactgactttgaagaggtagcctcctgcct

SEQ ID NO: 305 - DNA, 442 bp, Homo sapiens
  misc_feature (1)..(442): 203720_s_at
tttggcgacgtaattcccgactatgtgctgggccagagcacctgtgccctgttcctcagcctccgctaccacaacctgcacccagactacatccatgggcggctgcagagcctggggaagaacttcgccttgcgggtcctgcttgtccaggtggatgtgaaagatccccagcaggccctcaaggagctggctaagatgtgtatcctggccgactgcacattgatcctcgcctggagccccgaggaagctgggcggtacctggagacctacaaggcctatgagcagaaaccagcggacctcctgatggagaagctagagcaggacttcgtctcccgggtgactgaatgtctgaccaccgtgaagtcagtcaacaaaacggacagtcagaccctcctgaccacatttggatctctggaacagctcatcgccgcatcaagagaag

SEQ ID NO: 306 - DNA, 475 bp, Homo sapiens
  misc_feature (1)..(475): 203744_at
accgagacaaacccttgatgctccttgctcggcgttgaggctgtggggaagatgccttttgggagaggctgtagctcagggcgtgcactgtgaggctggacctgttgactctgcagggggcatccatttagcttcaggttgtcttgtttctgtatatagtgacatagcattctgctgccatcttagctgtggacaaaggggggtcagctggcatgagaatatttttttttaagtgcggtagtttttaaactgtttgtttttaaacaaactatagaactcttcattgtcagcaaagcaaagagtcactgcatcaatgaaagttcaagaacctcctgtacttaaacacgattcgcaacgttctgttattttttttgtatgtttagaatgctgaaatgtttttgaagttaaataaacagtattacatttttagaactcttctctactataacagtcaatttctgactcacagcagtga

SEQ ID NO: 307 - DNA, 443 bp, Homo sapiens
  misc_feature (1)..(443): 203787_at
aggaatctcagtcacaccaaaccaaccttttcatttcctgctctctcccctcttttgtgaagaaagcgggtccagatgtgattcaaacaactgtacggagtggcatattagaattgccctaaactgaactgcaaataattatgtgtgtatgtatatgtgtgggaaagagaatgtactgtatatgtgtatgttatacagacatatacacatacatacattgacccacaggacattgtaaaatattatcacatgacatcttaagtagaaataagtagggacttttattccatcctttttttcacgtttacattttaattattacaagttgctcctgccccctccctgaactattttgtgctgtgtatatcactgctttatataagttattttttaaggtgaactcagatgttatggttttgtatatgtctgcaatcatggatagg

SEQ ID NO: 308 - DNA, 316 bp, Homo sapiens
  misc_feature (1)..(316): 203800_s_at
tgatgaagaaattgctgccctcccccgggatagctgtcctgttagaatcagaaatcggtgtgttatgacgtcccgtccgcgtggtgtgaagcggcgctggaggcttagtcgtatagtcttccgtcacttagctgaccatgggcaactttctgggatccagcgagcgacatggtaaatgagctccagaacctattgagcttgcagggaagccaagcttgcagttccagcaagcaaagattttttttaatagaccaaaccctaatctctacaggggcccagtacagttgtttggcctacctgatgctatctctaaact

SEQ ID NO: 309 - DNA, 510 bp, Homo sapiens
  misc_feature (1)..(510): 203821_at
gagccactctatgagttggacttcagtcttgcctaggcgattttgtctaccatttgtgttttgaaagcccaaggtgctgatgtcaaagtgtaacagatatcagtgtctccccgtgtcctctccctgccaagtctcagaagaggttgggcttccatgcctgtagctttcctggtccctcacccccatggccccaggccacagcgtgggaactcactttcccttgtgtcaagacatttctctaactcctgccattcttctggtgctactccatgcaggggtcagtgcagcagaggacagtctggagaaggtattagcaaagcaaaaggctgagaaggaacagggaacattggagctgactgttcttggtaactgattacctgccaattgctaccgagaaggttggaggtggggaaggctttgtataatcccacccacctcaccaaaacgatgaaggtatgctgtcatggtcctttctggaagtttctggtgccatttctgaactgttacaac

SEQ ID NO: 310 - DNA, 508 bp, Homo sapiens
  misc_feature (1)..(508): 203879_at
agatggggctaggactgtgggcttttagcagcccacaggtgatcctaacatatcaggccatggactcaggacctgcccggtgatgctgttgatttctcaaaggtcttccaaaactcaacagagccagaagtagccgcccgctcagcggctcaggtgccagctctgttctgattcaccaggggtccgtcagtagtcattgccacccgcggggcacctccctggccacacgcctgttcccagcaagtgctgaaactcactagaccgtctgcctgtttcgaaatggggaaagccgtgcgtgcgcgttatttatttaagtgcgcctgtgtgcgcgggtgtgggagcacactttgcaaagccacagcgtttctggttttgggtgtacagtcttgtgtgcctggcgagaagaatattttctatttttttaagtcatttcatgtttctgtctggggaaggcaagttagttaagtatcactgatgtgggttgagaccagcactctgtgaaaccttg

SEQ ID NO: 311 - DNA, 326 bp, Homo sapiens
  misc_feature (1)..(326): 203887_s_at
cagggggtgtgtctgctcagtaatttgaggacaaccattccagactgcttccaattttctggaatacatgaaatatagatcagttataagtagcaggccaagtcaggcccttattttcaagaaactgaggaattttctttgtgtagctttgctctttggtagaaaaggctaggtacacagctctagacactgccacacagggtctgcaaggtctttggttcagctaagctaggaatgaaatcctgcttcagtgtatggaaataaatgtatcatagaaatgtaacttttgtaagacaaaggttttcctcttctattttgtaaactca

SEQ ID NO: 312 - DNA, 156 bp, Homo sapiens
  misc_feature (1)..(156): 203888_at
gcctagccttaatcaggtcctcagagaatttctaccatttcagagaggccttttggaatgtggcccctgaacaagaattggaagctgccctgcccatgggagctggttagaaatgcagaatcctaggctccaccccatccagttcatgagaatcta

SEQ ID NO: 313 - DNA, 465 bp, Homo sapiens
  misc_feature (1)..(465): 203904_x_at
cttgcccaccctgactgaaagtagggggctttctggggcctagcgatctctcctggcctatccgctgccagccttgagccctggctgttctgtggttcctctgctcaccgcccatcagggttctcttatcaactcagagaaaaatgctccccacagcgtccctggcgcaggtgggctggacttctacctgccctcaagggtgtgtatattgtataggggcaactgtatgaaaaattggggaggagggggccgggcgcggtgctcacgcctgtaatcccagcactttgggaggccgaggcgggtggatcacgaggtcaggagatcgagaccatcctggctaacatggtgaaaccccgtctctactaaaaatacaaaaaaaatttagccgggcgcggtggcgggcacctgtagtcccagctacttgggaggctgaggcaggagaatggtgtgaacccgggagcggag

SEQ ID NO: 314 - DNA, 527 bp, Homo sapiens
  misc_feature (1)..(527): 203939_at
gtcactgtaaatcattcttaagcccagatatgagaacttctgctggaaagtgggaccctctgagtgggtggtcagaaaatacccatgctgatgaaatgacctatgcccaaagaacaaatacttaacgtgggagtggaaccacatgagcctgctcagctctgcataagtaattcaagaaatgggaggcttcaccttaaaaacagtgtgcaaatggcagctagaggttttgataggaagtatgtttgtttcttagtgtttacaaatattaagtactcttgatacaaaatatacttttaaacttcataacctttttataaaagttgttgcagcaaaataatagcctcggttctatgcatatatggattgctataaaaaatgtcaataagattgtacaaggaaaattagagaaagtcacatttagggtttattttttacacttggccagtaaaatagggtaaatcctattagaaattttttaaagaactttttttaagtttcctaaatctgtgtgtgtattgtgaagtggt

SEQ ID NO: 315 - DNA, 449 bp, Homo sapiens
  misc_feature (1)..(449): 203947_at
gcacggcagcagaagcggattcggtagggttttaaacgcctctgcagaaaactcctgtccaggattccttttgcctcaagtggtatgtttaaaagagacaacgctttgttacaaggttcttggaaacaaagttgtattgtcattggtgcctctatcacatggttcttgagaaaaaacaaaccaacctgtgtgaattttagaatacggaacagacctatgctctaagcaaaattaggttttcaaaaatgtgagaacagtacaaagtggcagaaccacattttgttccctcttcaagggtgtcttgtatgtgccgcttgaagatttgtgagtttttcaacagttttattttaaaaactggatggcttatgattgtaaagcattttatcacattttctgaaaacaattgttcttggtttgcttatgtagagtcctgccttattgtttgtttt

SEQ ID NO: 316 - DNA, 487 bp, Homo sapiens
  misc_feature (1)..(487): 203948_s_at
gcagtatggcacgcccaacaacatcgacatctggatgggcggcgtgtccgagcctctgaagcgcaaaggccgcgtgggcccactcctcgcctgcatcatcggtacccagttcaggaagctccgggatggtgatcggttttggtgggagaacgagggtgtgttcagcatgcagcagcgacaggccctggcccagatctcattgccccggatcatctgcgacaacacaggcatcaccaccgtgtctaagaacaacatcttcatgtccaactcatatccccgggactttgtcaactgcagtacacttcctgcattgaacctggcttcctggagggaagcctcctagaggccaggtaagggggtgcagcagtgaggggtatatctgggctggccagttggaaccacggagatctccttgccctagatgagcccagccctgttctgggtgcagctgagaaaatgagtgactagacgttcatttgtgtgctca

SEQ ID NO: 317 - DNA, 480 bp, Homo sapiens
  misc_feature (1)..(480): 203949_at
agcggactggtgaggagcacagctcaggaactagactgcctgggttccaatcctggctctgtggcttgctagctatgtgaccttgagcaaattaccctccttaaacaagagttttcttccttgtaaattacatctgtcatggtttcttggagggcccacttgtatcctctggttcttcatttattgagcacctactacatgcaaggcactgtactaggcgtgagaagcatatagaggcaagaaagagataccaagatgccatctgtgtcctggttagcagagctggaccagtggtgccttggagggataagccagctgcagctgggctgtgtggttgacttatgggcccagccagccaggctcaggccatggctcccctttttcttcctcaccctgatttcttgcttattcactgaagttctcctgaagaggaactgggcctgttgccctttctgtaccatttatttgctcccaatgttt

SEQ ID NO: 318 - DNA, 512 bp, Homo sapiens
  misc_feature (1)..(512): 204006_s_at
gagtacaggtgccagacaaacctctccaccctcagtgacccggtgcagctagaagtccatatcggctggctgttgctccaggcccctcggtgggtgttcaaggaggaagaccctattcacctgaggtgtcacagctggaagaacactgctctgcataaggtcacatatttacagaatggcaaagacaggaagtattttcatcataattctgacttccacattccaaaagccacactcaaagatagcggctcctacttctgcagggggcttgttgggagtaaaaatgtgtcttcagagactgtgaacatcaccatcactcaaggtttggcagtgtcaaccatctcatcattctctccacctgggtaccaagtctctttctgcttggtgatggtactcctttttgcagtggacacaggactatatttctctgtgaagacaaacatttgaagctcaacaagagactggaaggaccataaacttaaatggagaaaggaccctcaagacaaatgacc

SEQ ID NO: 319 - DNA, 489 bp, Homo sapiens
  misc_feature (1)..(489): 204011_at
gagatacagaacttggtgacccatgtattgcataagctaaagcaacacagacactcctaggcaaagtttttgtttgtgaatagtacttgcaaaacttgtaaattagcagatgacttttttccattgttttctccagagagaatgtgctatatttttgtatatacaataatatttgcaactgtgaaaaacaagttgtgccatactacatggcacagacacaaaatattatactaatatgttgtacattcggaagaatgtgaatcaatcagtatgtttttagattgtattttgccttacagaaagcctttattgtaagactctgatttccctttggacttcatgtatattgtacagttacagtaaaattcaacctttattttctaattttttcaacatattgtttagtgtaaagaatatttatttgaagttttattattttataaaaaagaatatttattttaagaggcatcttacaaattttgccccttt

SEQ ID NO: 320 - DNA, 482 bp, Homo sapiens
  misc_feature (1)..(482): 204019_s_at
gagctgactgacatatctttaaatactttgtactaactttatcacacttactgtgtcatagaatatcatacagtttatacgctcatagttctcttgtgaacacttcaaacatcgctaagcatttgatctggccatgtatatggtagctgtgttttaatttgagaatcttgagggtagagccacaaatttcaattcttacatttccatttgcaaagtgactagagaaaaagaaatcagcttaaatgaggtattaagtaatgtttagagttgtaggtattaactagaatataaatccttagaaattgtctttataccttcaaaaattatactatgcatttatcatagaaatgtgattacaaagaagtctgactaccatgtctttaaacatatggcatctctcaacttttcttccttatggggctacatttgttcatttccagcagtagcataaacttacggtgacatggtagacttgtctctaa

SEQ ID NO: 321 - DNA, 501 bp, Homo sapiens
  misc_feature (1)..(501): 204020_at
actagcactgtctcctaaacttgtaagaggtctgaagctattctttgatttttgctagtgctattaacttatgtagacctgttaaaaagcagagcaacacaattatagttatcctactgagccatggattctgagttttgttttaaaagtgaaagccaagttggtgtatgtaaaggatttccatgtagctgtggtgctagttattactggctacattatatgctaagtgtatttgtgttccccaagtgtacaagccttctatcaaaagtatgttctataactcatatattcaaggtgtagggtatgaaaatgcaaagtttaggagagcactttaccaagctggtgtcctccaaactgaaattgtttgtaacgatagtcttttacaggttttcctttaaagatgtttgtgtgcttttaattgacaactaacttcttgctgctgtatagtaaaatattaatatatttttatcattaaactgctgcatgactatcatctttgag

SEQ ID NO: 322 - DNA, 509 bp, Homo sapiens
  misc_feature (1)..(509): 204030_s_at
aatttattttgcttctgtggttgtaaaaatgctgttgctaaaggtggcgcagaaacaaatatcagtgttagtcattgataatgtctgaagcttaatgtccagtgattggcctttgcttcttaatttattttaattttttacttgtgccacttaatatcaggcattttaataaaatattgttacaaaaaatgtacagtactgacaccaccacaaatcatggttaataaaagagagtagttttaactttatttttatttgtttagagattttaagttggaacagtattttcccattgactacttttcattcttcactgtagttttaaagaagaactgtaaatgacggtgctatacaagtcaaaaaatacatgcctgcctcgtagtgaagttgtagctctccgtaatatgtatattttactcagttttcaacattttgtgaatgttgactacctgaagttcctttttagatgtgctattaacattctgttggattcagagggttccttgaaa

SEQ ID NO: 323 - DNA, 540 bp, Homo sapiens
  misc_feature (1)..(540): 204039_at
aagctaggtcgtgggtcagctctgaggatgtatacccctggtgggagagggagacctagagatctggctgtggggcgggcatggggggtgaagggccactgggaccctcagccttgtttgtactgtatgccttcagcattgcctaggaacacgaagcacgatcagtccatccagagggaccggagttatgacaagcttcccaaatattttgctttatcagccgatatcaacacttgtatctggcctctgtgcccagcagtgccttgtgcaatgtgaatgtaccgtctctgctaaaccaccattttatttggttttgttttgtttggttttctcggatacttgccaaaatgagactctccgtcggcagctgggggaagggtctgagactctctttccttttggttttgggattacttttgatcctgggggaccaatgaggtgaggggggttctcctttgccctcagctttcccagccctccggcctgggctgcccacaaggcttctcccccagaggccctggctcctggtcgggaagggag

SEQ ID NO: 324 - DNA, 489 bp, Homo sapiens
  misc_feature (1)..(489): 204040_at
ttctgataattaacctaagcccttatgaaaataaacaaaatgaagggattatgacaggtattaccaaaaacaccaaaaggaacaaaggggcctgcgttaaaacctaattgctaatgcttcacaactaggagagcatgccgtcttgatgtttaaaaaacccagggtctccacccttcctttgatttgtgcaattctgtcttccacagttccggagccttcagtgaggggtagctacatgccccatgcctgccctttctttccttctttgctcactttactatgggtgtattttaatcttgtataaaaatatgcatgaatgagtcatgcacatgtatacgttatgtatttgacaagtggtggtgaaacaaaatcaaaacagatttgatttgtgtttttgaaatgtcagtacattttgtgccactaacactgtgatgtataaaagagctgtttgaatgccttttaatgttgtgttttgtactctggaatcat

SEQ ID NO: 325 - DNA, 532 bp, Homo sapiens
  misc_feature (1)..(532): 204069_at
aagccttacagttatcctgcaagggacaggaaggtctgatttgcaggatttttagagcattaaaataactatcaggcagaagaatctttcttctcgcctaggatttcagccatgcgcgcgctctctctctttctctctcttttcctctctctccctctttctagcctggggcttgaatttgcatgtctaattcatttactcaccatatttgaattggcctgaacagatgtaaatcgggaaggatgggaaaaactgcagtcatcaacaatgattaatcagctgttgcaggcagtgtcttaaggagactggtaggaggaggcatggaaaccaaaaggccgtgtgtttagaagcctaattgtcacatcaagcatcattgtccccatgcaacaaccaccaccttatacatcacttcctgttttaagcagctctaaaacatagactgaagatttatttttaatatgttgactttatttctgagcaaagcatcggtcatgtgtgtattttttcatagtcccaccttggagcatttatg

SEQ ID NO: 326 - DNA, 456 bp, Homo sapiens
  misc_feature (1)..(456): 204081_at
tcagtgcgctttcctgcgcgcactgcggagggcgccctaagcgtcacccaagcacactcacttaaagaaaaaacgagttctttcgttctgtgcgcagtaaaaggggcgccctacatctccgtgccactcccgccccagcctagccccaagactttggatccggggcgagatgaagggaagagggttgttttggtttcggacgacccttgctctgaccggaagagaagtccctatcccacacctgcctgtcacgttccctcccctttccccagcgcactgttgagggcagcctctccagctctcttgtttatgcaaacgccgagcgcctgggaggctcggtaggaggagtcttccacggccccgccccgccctgtcggtcccgccctccccccccgccgggctcctggggctgtggccgaaaggtttctgatctccgtgtgtgcatgtgactgtgct

SEQ ID NO: 327 - DNA, 283 bp, Homo sapiens
  misc_feature (1)..(283): 204086_at
tgaggacatccatggtaccctccacctggagaggcttgcctatctgcatgccaggctcagggagttgctgtgtgagttggggcggcccagcatggtctggcttagtgccaacccctgtcctcactgtggggacagaaccttctatgacccggagcccatcctgtgcccctgtttcatgcctaactagctgggtgcacatatcaaatgcttcattctgcatacttggacactaaagccaggatgtgcatgcatcttgaagcaacaaagcagccacagtttcaga

SEQ ID NO: 328 - DNA, 505 bp, Homo sapiens
  misc_feature (1)..(505): 204103_at
taccatgaagctctgcgtgactgtcctgtctctcctcatgctagtagctgccttctgctctccagcgctctcagcaccaatgggctcagaccctcccaccgcctgctgcttttcttacaccgcgaggaagcttcctcgcaactttgtggtagattactatgagaccagcagcctctgctcccagccagctgtggtattccaaaccaaaagaagcaagcaagtctgtgctgatcccagtgaatcctgggtccaggagtacgtgtatgacctggaactgaactgagctgctcagagacaggaagtcttcagggaaggtcacctgagcccggatgcttctccatgagacacatctcctccatactcaggactcctctccgcagttcctgtcccttctcttaatttaatcttttttatgtgccgtgttattgtattaggtgtcatttccattatttatattagtttagccaaaggataagtgtcctatggggatggtccactgtcactg

SEQ ID NO: 329 - DNA, 499 bp, Homo sapiens
  misc_feature (1)..(499): 204115_at
cgagcccggttctggggcgaaaatgcctgcccttcacatcgaagatttgccagagaaggaaaaactgaaaatggaagttgagcagcttcgcaaagaagtgaagttgcagagacaacaagtgtctaaatgttctgaagaaataaagaactatattgaagaacgttctggagaggatcctctagtaaagggaattccagaagacaagaacccctttaaagaaaaaggcagctgtgttatttcataaataacttgggagaaactgcatcctaagtggaagaactagtttgttttagttttcccagataaaaccaacatgctttttaaggaaggaagaatgaaattaaaaggagactttcttaagcaccatatagatagggttatgtataaaagcatatgtgctactcatctttgctcactatgcagtcttttttaagagagcagagagtatcagatgtacaattatggaaataagaacattacttgagcatgacacttcttt

SEQ ID NO: 330 - DNA, 444 bp, Homo sapiens
  misc_feature (1)..(444): 204118_at
aagctgcaagtgcttgaccctgtacccaagcctgtcatcaaaattgagaagatagaagacatggatgacaactgttatctgaaactgtcatgtgtgatacctggcgagtctgtaaactacacctggtatggggacaaaaggcccttcccaaaggagctccagaacagtgtgcttgaaaccacccttatgccacataattactccaggtgttatacttgccaagtcagcaattctgtgagcagcaagaatggcacggtctgcctcagtccaccctgtaccctggcccggtcctttggagtagaatggattgcaagttggctagtggtcacggtgcccaccattcttggcctgttacttacctgagatgagctcttttaactcaagcgaaacttcaaggccagaagatcttgcctgttggtgatcatgctcctcagcaggacagag

SEQ ID NO: 331 - DNA, 167 bp, Homo sapiens
  misc_feature (1)..(167): 204141_at
gcgaggacgaggcttaaaaacttctcagatcaatcgtgcatccttagtgaacttctgttgtcctcaagcatggtctttctacttgtaaactatggtgctcagttttgcctctgttagaaattcacactgttgatgtaatgatgtggaactcctctaaaaattacagt

SEQ ID NO: 332 - DNA, 521 bp, Homo sapiens
  misc_feature (1)..(521): 204158_s_at
gacgcatctgtgaatggctggagctccgatgaggaaaaggcagggggcctggatgatgaagaggaggccgagctcgtcccctccgaggtgctcatgcaccaggccatccacaccatcgagttctgcctgggctgcgtctccaacaccgcctcctacctgcgcctgtgggccctgagcctggcccacgcccagctgtccgaggttctgtgggccatggtgatgcgcataggcctgggcctgggccgggaggtgggcgtggcggctgtggtgctggtccccatctttgccgcctttgccgtgatgaccgtggctatcctgctggtgatggagggactctcagccttcctgcacgccctgcggctgcactgggtggaattccagaacaagttctactcaggcacgggctacaagctgagtcccttcaccttcgctgccacagatgactagggcccactgcaggtcctgccagacctccttcctgacctctgaggcaggagaggaataaagacggtccgccctgg

SEQ ID NO: 333 - DNA, 506 bp, Homo sapiens
  misc_feature (1)..(506): 204173_at
ctcagaaaacccaggagcctccagtcgatctctccaaagtggtgatcgagtttaacaaggaccagctggaggagttcaaggaggccttcgagctgtttgaccgagtgggggatggcaagatcctgtacagccagtgtggggacgtgatgagggccctgggccagaaccccaccaacgccgaggtgctcaaggtcctggggaaccccaagagtgatgagctgaagtcgcggcgtgtggactttgagactttcctgcccatgctccaggcagtggccaagaaccgaggccaaggcacatatgaggactacttggaggggtttcgtgtgtttgacaaggaggggaacgggaaagtcatgggagcagagctgagacatgttctcaccacccttggagagaagatgactgaggaggaggtggagaccgttctggcaggacacgaggacagcaacggctgcatcaactacgaggccttcttgaaacacatcctaagcgtctgagtgctgcag

SEQ ID NO: 334 - DNA, 512 bp, Homo sapiens
  misc_feature (1)..(512): 204187_at
tcttctacgggatgagctctgacaccgccatgaacaagcacgcaggaggagttgctgagtacagagcctctgagggtaagactgtggaagttccttacaaaggagatgtggaaaacactatcctggatattctcgggggactgaggtccacgtgcacctacgtgggggccgccaaactcaaggagctcagcaggagggcaacattcatccgggtgacccagcagcacaacaccgtgttcagctaaccctggggacaaagcagcgtctggctcgatggaagcgtccaaacctgcttttcccatctccccccaagtctgttccgtcagagcttctggctgctcctgaatggtggaatgcctgtgtcctctcttctgtctcctgccgcctggaggcttcggggctctcccgcctgccttctcggggcccagacgcaaggcaccgattgggccaacatcagagccctgctgcccagaactcataacctcattgttcaaaccaacacttgcaccttt

SEQ ID NO: 335 - DNA, 508 bp, Homo sapiens
  misc_feature (1)..(508): 204197_s_at
atccattgtccttgtagtttcttccctcctgttctctggttatagctggtcccaggtcagcgtgggaggcacctttgggttcccagtgcccagcactttgtagtctcatcccagattactaacccttcctgatcctggagaggcagggatagtaaataaattgctcttcctaccccatcccccatcccctgacaaaaagtgacggcagccgtactgagtctgtaaggcccaaagtgggtacagacagcctgggctggtaaaagtaggtccttatttacaaggctgcgttaaagttgtactaggcaaacacactgatgtaggaagcacgaggaaaggaagacgttttgatatagtgttactgtgagcctgtcagtagtgggtaccaatcttttgtgacatattgtcatgctgaggtgtgacacctgctgcactcatctgatgtaaaaccatcccagagctggcgagaggatggagctgggtggaaactgctttgcactatcgtttgctt

SEQ ID NO: 336 - DNA, 370 bp, Homo sapiens
  misc_feature (1)..(370): 204198_s_at
  misc_feature (251)..(251): n is a, c, g, or t
gaagatgagtctatggcatcaggttcttaaacccaggaaagcacctacagaccggctcctccatgcactttaccagctcaacgcatccactctctgttctcttggcagggcgggggaggggggataggaggtcccctttcccctaggtggtctcataattccatttgtggagagaacaggagggccagatagataggtcctagcagaaggcattgaggtgagggatcattttgggtcagacatcaatgtcnctgtcccccctgggtccagccaagctgtgccccatcccccaagcctcctgggaggatccagccaaatcttgcgactcctggcacacacctgtctgtaacctgttttgtgctctgaaagc

SEQ ID NO: 337 - DNA, 450 bp, Homo sapiens
  misc_feature (1)..(450): 204215_at
atatcatattttctatcatcatgttgtgtatatgtgcaaacctgtacttccatgatgtgggaaggtgaggctgccaaggagaagtacttaccaggactcttcaaaatgatacattaggacagtgagtaatttttggataaggtatgctgaagaatctcctgcagaagtctgatacatgattttcatgttaattgtaaatgttaattccctcttgcaagggagacatatcctagatcactttgctttttctttaaggagctgatgttgcacctaaacattccaacccttaaagctaaaacagcacaaaaaaatttcacttttgaaatgaaatttttataattgtatggcaaaaggctatgtaaaaacaaatcttgcatcttaagacaaatattcttttatttctgttaaactgaatatacaattgttccctaggcaaccaacttttgctta

SEQ ID NO: 338 - DNA, 464 bp, Homo sapiens
  misc_feature (1)..(464): 204224_s_at
gtgatggttggcttgagtacctttttaaatctagcccagtataaacattagcctgcttaatatttagacatttataggtagaattctgagcactcaactcatgtttggcattttaaagtaaaaacaagtgtgacttcgaggaccaaagaaattgtcagctatacatttatctttatgaactcatttatattcctttttaatgactcgttgttctaacatttcctagaagtgttcttataaaggtctaatgtatccacaggctgttgtcttattagtaaatgcaaagtaatgactttgtctgttttactctagtctttagtacttcaaaattaccttttcatatccatgatcttgagtccatttgggggatttttaagaatttgatgtatttcaatacactgttcaaaattaaattgtttaattttatgtatgagtatgtatgttcctgaagttggtcctattta

SEQ ID NO: 339 - DNA, 569 bp, Homo sapiens
  misc_feature (1)..(569): 204244_s_at
tgaggaacccaatgaatgtgacttcaagaatatggatagtttaccttctggtaaaatacatcgaaaagtgaaaataatattaggacgaaatagaaaagaaaatctggaaccaaatgctgaatttgataaaagaactgaatttattacacaagaagaaaacagaatttgtagttcaccggtacagtctttactagacttgtttcagactagtgaagagaaatcagaatttttgggtttcacaagctacacagaaaagagtggtatatgcaatgttttagatatttgggaagaggaaaattcagataatctgttaacagcgtttttctcgtccccttcaacttctacatttactggcttttagaatttaaaaaatgcatacttttcagaagtgataaggatcatattcttgaaatttttataaatatgtatggaaattcttaggatttttttaccagctttgtttacagacccaaatgtaaatattaaaaataaatatttgcaattttctacagaattgaatacctgttaaagaaaaattacagaataaacttgtgactggtcttgtttta

SEQ ID NO: 340 - DNA, 527 bp, Homo sapiens
  misc_feature (1)..(527): 204304_s_at
aacctacagcatattcttcacgcagagattttcatctattatactttatcaaagattggccatgttccacttggaaatggcatgcaaaagccatcatagagaaacctgcgtaactccatctgacaaattcaaaagagagagagagatcttgagagagaaatgctgttcgttcaaaagtggagttgttttaacagatgccaattacggtgtacagtttaacagagttttctgttgcattaggataaacattaattggagtgcagctaacatgagtatcatcagactagtatcaagtgttctaaaatgaaatatgagaagatcctgtcacaattcttagatctggtgtccagcatggatgaaacctttgagtttggtccctaaatttgcatgaaagcacaaggtaaatattcatttgcttcaggagtttcatgttggatctgtcattatcaaaagtgatcagcaatgaagaactggtcggacaaaatttaacgttgatgtaatggaattccagatgtaggcattccccc

SEQ ID NO: 341 - DNA, 470 bp, Homo sapiens
  misc_feature (1)..(470): 204369_at
gagaacgtgtgccatttgttttgacacaggatttcttaatagtgattagtaaaggagcccaagaatgcacaaagacaagagaatttgagaggtttcaggagatgtgttacaaggcttatctagctattcgacagcatgccaatctcttcataaatcttttctcaatgatgcttggctctggaatgccagaactacaatcttttgatgacattgcatacattcgaaagaccctagccttagataaaactgagcaagaggctttggagtatttcatgaaacaaatgaatgatgcacatcatggtggctggacaacaaaaatggattggatcttccacacaattaaacagcatgcattgaactgaaagataactgagaaaatgaaagctcactctggattccacactgcactgttaataactctcagcaggcaaagaccgattgcataggaattgcacaatccatgaacagca

SEQ ID NO: 342 - DNA, 295 bp, Homo sapiens
  misc_feature (1)..(295): 204386_s_at
gaaatggtcctaatcctgagtcgtcacccttggattttatggatcacggagctgaccatctttacctggtcctggaactgaaaaactgtagcttgtgtgaaaatgagcctttggaccagtctttattaaaacaaacaaacatgagtagtctgcatatcgaatatctagagctctaaaccccccaatacttaaaagtctaattgctgtcctgtggtttcattagtctgataggaagatagggatttcctcagtcacagatgatattttgaaggaaagctgcaataaagccacaatg

SEQ ID NO: 343 - DNA, 456 bp, Homo sapiens
  misc_feature (1)..(456): 204391_x_at
tgactattctcatctctgttttgcaggtttacgccgcacactttgatttccttaatagcccatttctgttaacctattatcactaagaaagaaaggaaagaaggagatgaatagaagaaagaaaatggaaagaaggaaaaaaggaggattgaaaaaggatggaagaaagaagccattgaaaacaaagacattcttcccacttcttggatttttaaaccacagtctggagtgatagctactgtagaaaggaaatagacttttatgaactctttaagttgaaaagtaaaaaatatatgtggtttggatgtgtgctttaattcagctttagaaattaataccactacccgtgaattatatggcctgacaatatgaattaggtgtactgtactgaagaacagtactccacaaacatgggtggtaacaagagttccatcccaggaggccaaacggtgcaac

SEQ ID NO: 344 - DNA, 381 bp, Homo sapiens
  misc_feature (1)..(381): 204396_s_at
tcccgtcgacgtagaacctcgaggtttctcaaagaaatttccactcaggtctgttttccgaggcggccccgggcgggtggattggatttgtctttggtgaacattgcaatagaaatccaattggatacgacaacttgcacgtattttaatagcgtcataactagaactgaattttgtctttatgatttttaaagaaaagttttgtaaatttctctactgtctcagtttacattttcggtatatttgtatttaaatgaagtgagactttgagggtgtatattttctgtgcagccactgttaagccatgtgttccaaggcattttagcggggagggggttatcaaaaaaaaaaaaaatgtgactcaagacttccagagcctca

SEQ ID NO: 345 - DNA, 549 bp, Homo sapiens
  misc_feature (1)..(549): 204409_s_at
aggttatgccatatcagagggaaattgagaaaaaaggtttggataaatacatcagacattatattggttggtctacgggactatcaggataacaaagctgatgtaattttaaagtacaatgcagatgaagctagaagcctgaaggcatatggcgagcttccagaacatgctaaaatcaatgaaacagacacatttggtcctggagatgatgatgaaatccagtttgacgatattggagatgatgatgaagacattgatgatatctaaattgaaccaagtgtttttacatgacaagttctctgaggatggttctacagttgggattttggccatcatcaaccaagaagagaaattcatttagtgtgtagtttctgaaagcaaactgatttattttcattgttttaaagtatttatttctttaaaagctgaggacactgaattaccttaagttaaatgttaatactttattgttttgatgtaatggaacttaaggataaaagaccataatatttgctgttaaaataaataaacgagtgcctttcctactgt

SEQ ID NO: 346 - DNA, 340 bp, Homo sapiens
  misc_feature (1)..(340): 204411_at
ttttgcagggaaagttctgtttcttctttgatacctttgttctgtcccctgccccatccccagcactcatgatcttgaagcccctatcacactctagttcagtcctgtgaaccatgtcctgagggccttgcagggaagtaggaaatagaaactcctccacaaagagccgaggatcagagaagacccctgagatgaatcagggccctgccctgcccaccaactcttttctagcaatcatgtcctgcccaggctgcaggcttcattaggctcctgctgtcctccatgatgtgactagcacaaggtgtatatatgttttgtacctctgccgatggctgtacat

SEQ ID NO: 347 - DNA, 507 bp, Homo sapiens
  misc_feature (1)..(507): 204419_x_at
acactcgcttctggaacgtctgaggttatcaataagctcctagtccagacgccatgggtcatttcacagaggaggacaaggctactatcacaagcctgtggggcaaggtgaatgtggaagatgctggaggagaaaccctgggaaggctcctggttgtctacccatggacccagaggttctttgacagctttggcaacctgtcctctgcctctgccatcatgggcaaccccaaagtcaaggcacatggcaagaaggtgctgacttccttgggagatgccataaagcacctggatgatctcaagggcacctttgcccagctgagtgaactgcactgtgacaagctgcatgtggatcctgagaacttcaagctcctgggaaatgtgctggtgaccgttttggcaatccatttcggcaaagaattcacccctgaggtgcaggcttcctggcagaagatggtgactggagtggccagtgccctgtcctccagataccactgagctcactgcc

SEQ ID NO: 348 - DNA, 492 bp, Homo sapiens
  misc_feature (1)..(492): 204429_s_at
tatgggtacaacgtggctgctgtcaactccccagcactgctcatgcaacaattttacaatgagacttactatggtaggaccggtgaattcatggaagacttccccttgacgttgctgtggtctgtaaccgtgtccatgtttccatttggagggtttatcggatccctcctggtcggccccttggtgaataaatttggcagaaaaggggccttgctgttcaacaacatattttctatcgtgcctgcgatcttaatgggatgcagcagagtcgccacatcatttgagcttatcattatttccagacttttggtgggaatatgtgcaggtgtatcttccaacgtggtccccatgtacttaggggagctggcccctaaaaacctgcggggggctctcggggtggtgccccagctcttcatcactgttggcatccttgtggcccagatctttggtcttcggaatctccttgcaaacgtagatggctggccgatcctg

SEQ ID NO: 349 - DNA, 547 bp, Homo sapiens
  misc_feature (1)..(547): 204440_at
tccatttctcatgttttccattgtttgaaacaaagaaggttaccaagaagcctttcctgtagccttctgtaggaattcttttggggaagtgaggaagccaggtccacggtctgttcttgaagcagtagcctaacacactccaagatatggacacacgggagccgctggcagaagggacttcacgaagtgttgcatggatgttttagccattgttggctttcccttatcaaacttgggcccttcccttcttggtttccaaaggcatttattgctgagttatatgttcactgtccccctaatattagggagtaaaacggataccaagttgatttagtgtttttacctctgtcttggctttcatgttattaaacgtatgcatgtgaagaagggtgtttttctgttttatattcaactcataagactttgggataggaaaaatgagtaatggttactaggcttaatacctgggtgattacataatctgtacaacgaacccccatgatgtaagtttacctatgtaacaaacctgcacttatacccatgaact

SEQ ID NO: 350 - DNA, 300 bp, Homo sapiens
  misc_feature (1)..(300): 204466_s_at
gaaatatctttgctcccagtttcttgagatctgctgacagatgttccatcctgtacaagtgctcagttccaatgtgcccagtcatgacatttctcaaagtttttacagtgtatctcgaagtcttccatcagcagtgattgaagtatctgtacctgcccccactcagcatttcggtgcttccctttcactgaagtgaatacatggtagcagggtctttgtgtgctgtggattttgtggcttcaatctacgatgttaaaacaaattaaaaacacctaagtgactaccacttatttctaaatc

SEQ ID NO: 351 - DNA, 309 bp, Homo sapiens
  misc_feature (1)..(309): 204467_s_at
ctcggaattccctgaagcaacactgccagaagtgtgttttggtatgcactggttccttaagtggctgtgattaattattgaaagtggggtgttgaagaccccaactactattgtagagtggtctatttctcccttcaatcctgtcaatgtttgctttatgtattttggggaactgttgtttgatgtgtatgtgtttataattgttatacatttttaattgagccttttattaacatatattgttatttttgtctcgaaataattttttagttaaaatctattttgtctgatattggtgtgaatgctgta

SEQ ID NO: 352 - DNA, 534 bp, Homo sapiens
  misc_feature (1)..(534): 204491_at
tgtaaacccatctatttaaacgcaaaggtgggttgatgtcagtttacatagcagaaagcattcactatcctctaagatttgtttctgcaaaactttcattgctttagaattttaaaatttcaccttgtacaatggccagcccctaaagcaggaaacatttataatggattatatggaaacatcctcccagtacttgcccagcccttgaatcatgtggcttttcagtgaaaggaaagattctttttctaggaaaaatgagcctattttattttattttattttattttttgacacaaactgtagattttagcagccctggcccaaaggaatttgattacttttgttttaaacagtacaaaggggacactataattacaaaaacatccttaactgatttgagttgtttttatttctttggatatattttcagagtggtaaattgtgtgtgagaattacaaatgattattcttttagtggtttcttagcctctcttacagcccacggggatagtactgtacatcaataccttcatat

SEQ ID NO: 353 - DNA, 378 bp, Homo sapiens
  misc_feature (1)..(378): 204561_x_at
tgcccgtccggagctggtgaggacagcctgccagagtctggtctctggacactatgggcacacgactcctcccagctctgtttcttgtcctcctggtattgggatttgaggtccaggggacccaacagccccagcaagatgagatgcctagcccgaccttcctcacccaggtgaaggaatctctctccagttactgggagtcagcaaagacagccgcccagaacctgtacgagaagacatacctgcccgctgtagatgagaaactcagggacttgtacagcaaaagcacagcagccatgagcacttagacaggcatttttactgaccaagttctttctgtgctgaagggagaggagtaacagccagacacagccagac

SEQ ID NO: 354 - DNA, 479 bp, Homo sapiens
  misc_feature (1)..(479): 204588_s_at
acataagcgaccgctttacctccgaaggatcgtggggtctgccacaaggtacctccaggtcctgtgtatgtcagttgctgcagaaatggatttggaagatggaggagagatgcccaagcaacgggatcccaagtctaactaaacaccatctggaatcctgatgtggaaagcaggggtttctggtctactggctagagctaaggaagttgaaaaggaaagctcacttctttggaggcacctgtccagaagcctggcctaggcagcttcaacctttgaacttactttttgaaatgaaaagtaatttatttgttttgctacatactgttccagacttttaaaggggacaatgaaggtgactgtggggaggagcatgtcaggtttgggcttggttgttttagaagcacctgggtgtgcctacctactcctcttttcttttaaaagggcccacaatgctccaatttcctgtctcctttagagag

SEQ ID NO: 355 - DNA, 545 bp, Homo sapiens
  misc_feature (1)..(545): 204613_at
agcgaggacatagagctggcttccctcctggttttctgtgagatgcggccagtcctggagagcgaagaggaactttactcctcctgtcgccagctgaggaggcggcaagaagaactgaacaaccagctctttctgtatgacacacaccagaacttgcgcaatgccaaccgggatgccctggttaaagagttcagtgttaatgagaaccactccagctgtaccaggagaaatgcaacaagaggttaagagagaagagagtcagcaacagcaagttttactcatagaagctggggtatgtgtgtaagggtattgtgtgtgtgcgcatgtgtgtttgcatgtaggagaacgtgccctattcacactctgggaagacgctaatctgtgacatcttttcttcaagcctgccatcaaggacatttcttaagacccaactggcatgagttggggtaatttcctattattttcatcttggacaacttctaacttatatctttatagaggattccccaaaatgtgctcctcatttttggcctctcatgttccaa

SEQ ID NO: 356 - DNA, 465 bp, Homo sapiens
  misc_feature (1)..(465): 204614_at
ttcctcaccctaaaactaagcgtgctgcttctgcaaaagatttttgtagatgagctgtgtgcctcagaattgctatttcaaattgccaaaaatttagagatgttttctacatatttctgctcttctgaacaacttctgctacccactaaataaaaacacagaaataattagacaattgtctattataacatgacaaccctattaatcatttggtcttctaaaatgggatcatgcccatttagattttccttactatcagtttatttttataacattaacttttactttgttatttattattttatataatggtgagtttttaaattattgctcactgcctatttaatgtagctaataaagttatagaagcagatgatctgttaatttcctatctaataaatgcctttaattgttctcataatgaagaataagtaggtaccctccatgcccttctgtaataaatat

SEQ ID NO: 357 - DNA, 531 bp, Homo sapiens
  misc_feature (1)..(531): 204621_s_at
  misc_feature (280)..(280): n is a, c, g, or t
  misc_feature (367)..(367): n is a, c, g, or t
  misc_feature (368)..(368): n is a, c, g, or t
agagggggcaagtcacatgggcagagatagccgtgtgagcagtctcagctcaagctgccccccatttctgtaaccctcctagcccccttgatccctaaagaaaacaaacaaacaaacaaaaactgttgctatttcctaacctgcaggcagaacctgaaagggcattttggctccggggcatcctggatttagaacatggactacacacaatacagtggtataaactttttattctcagtttaaaaatcagtttgttgttcagaagaaagattgctataangtataatgggaaatgtttggccatgcttggttgttgcagttcagacaaatgtaacacacacacacatacacacacacacacacacanngagacacatcttaaggggacccacaagtattgccctttaacaagacttcaaagttttctgctgtaaagaaagctgtaatatatagtaaaactaaatgttgcgtgggtggcatgagttgaagaaggcaaaggcttgtaaatttacccaatgcagtttggctttt

SEQ ID NO: 358 - DNA, 418 bp, Homo sapiens
  misc_feature (1)..(418): 204622_x_at
ggtgggcacaagtattacacatcagaaaatcctgacaaaagggacacatagtgtttgtaacaccgtccaacattccttgtttgtaagtgttgtatgtaccgttgatgttgataaaaagaaagtttatatcttgattattttgttgtctaaagctaaacaaaacttgcatgcagcagcttttgactgtttccagagtgcttataatatacataactccctggaaataactgagcactttgaattttttttatgtctaaaattgtcagttaatttattattttgtttgagtaagaattttaatattgccatattctgtagtatttttctttgtatatttctagtatggcacatgatatgagtcactgcctttttttctatggtgtatgacagttagagatgctgattttttttctgataa

SEQ ID NO: 359 - DNA, 414 bp, Homo sapiens
  misc_feature (1)..(414): 204627_s_at
ctctggcctcagtgttacagctaaataatctttaattaaggcaagtcactttcttcttcttaaagctgtttctagtttgagaaatgatgggattttagcagccagtcttgaaggtctctttcagtatcaacattctaagatgctgggacttactgtgtcatcaaatgtgcggttaagattctctgggatattgatactgtttgtgtttttagttgggagatctgagagacctggctttggcaagagcagatgtcattccatatcacctttctcaatgaaagtctcattctatcctctctccaaacccgttttccaacatttgttaatagttacgtctctcctgatgtagcacttaagcttcatttagttattatttctttcttcactttgcacacatttgcatccacatattag

SEQ ID NO: 360 - DNA, 122 bp, Homo sapiens
  misc_feature (1)..(122): 204647_at
ccggggctggttttctatgaacgattccggcctgggatgcgggccaggctgcaggcggcatagttgggcccattcgtcctggaaagggactggggggtcccaacttagccctgggtgggccg

SEQ ID NO: 361 - DNA, 170 bp, Homo sapiens
  misc_feature (1)..(170): 204655_at
tccccaactaaagcctagaagagcttctgaggcgctgctttgtcaaaaggaagtctctaggttctgagctctggctttgccttggctttgcaagggctctgtgacaaggaaggaagtcagcatgcctctagaggcaaggaagggaggaacactgcactcttaagcttccg

SEQ ID NO: 362 - DNA, 432 bp, Homo sapiens
  misc_feature (1)..(432): 204731_at
tgtatttcttacaggcctacagaaattgaaaatgaccaaaatcaggaaccacagatttgtgcccattcctaatattttgttctgcaaattaatgtataatttgaggtgaaattcagttataaagtcaaggacgaatttgcacagtgatatatttctatgtgtatgcaagtacaagtatataatatgtcacctggcacattcattttctcagttgaagaagagaaaatttgaaaatgtccttatgcttttagagttgcaacttaagtatatttggtagggtgagtgtttccactcaaaatatgtcaacttaaaaaaaaataggccctttcataaaaaccaaactgtagcaagatgcaaatgcatggcaaatctgtcggtctccagttggttatctgaatagtgtcaccaattccaccaagacagtgctgagat

SEQ ID NO: 363 - DNA, 504 bp, Homo sapiens
  misc_feature (1)..(504): 204777_s_at
ggaagtcttcataaagccgcagtagaacttgagctgaaaacccagatggtgttaactggccgccccactttccggcataactttttagaaaacagaaatgcccttgatggtggaaaaaagaaaacaaccacccccccactgcccaaaaaaaaaagccctgccctgttgctcgtgggtgctgtgtttactctcccgtgtgccttcgcgtccgggttgggagcttgctgtgtctaacctccaactgctgtgctgtctgctagggtcacctcctgtttgtgaaaggggaccttcttgttcgggggtgggaagtggcgaccgtgacctgagaaggaaagaaagatcctctgctgacccctggagcagctctcgagaactacctgttggtattgtccacaagctctcccgagcgccccatcttgtgccatgttttaagtcttcatggatgttctgcatgtcatggggactaaaactcacccaacagatctttccagaggtccatggtgg

SEQ ID NO: 364 - DNA, 431 bp, Homo sapiens
  misc_feature (1)..(431): 204780_s_at
gattctgcctccaaggatgtttaaaatctagttgggaaaacaaacttcatcaagagtaaatgcagtggcatgctaagtacccaaataggagtgtatgcagaggatgaaagattaagattatgctctggcatctaacatatgattctgtagtatgaatgtaatcagtgtatgttagtacaaatgtctatccacaggctaaccccactctatgaatcaatagaagaagctatgaccttttgctgaaatatcagttactgaacaggcaggccactttgcctctaaattacctctgataattctagagattttaccatatttctaaactttgtttataactctgagaagatcatatttatgtaaagtatatgtatttgagtgcagaatttaaataaggctctacctcaaagacctttgcacagtttattggtgtc

SEQ ID NO: 365 - DNA, 514 bp, Homo sapiens
  misc_feature (1)..(514): 204790_at
agggacatgcttagcagtccccttccctccaagaaggatttggtccgtcataacccaaggtaccatcctaggctgacacctaactcttctttcatttcttctacaactcatacactcgtatgatacttcgacactgttcttagctcaatgagcatgtttagactttaacataagctatttttctaactacaaaggtttaaatgaacaagagaagcattctcattggaaatttagcattgtagtgctttgagagagaaaggactcctgaaaaaaaacctgagatttattaaagaaaaaaatgtattttatgttatatataaatatattattacttgtaaatataaagacgttttataagcatcattatttatgtattgtgcaatgtgtataaacaagaaaaataaagaaaagatgcactttgctttaatataaatgcaaataacaaatgccaaattaaaaaagataaacacaagattggtgttttttcctatgggtgttatcacctagctgaatg

SEQ ID NO: 366 - DNA, 425 bp, Homo sapiens
  misc_feature (1)..(425): 204793_at
cagtgttctctgatgatgatttcaatattgagccgcttatttctgcattccacaaagttgagaaatttgctaaggaactgcaaggcaaaacagacaatcaaaatgaccctgaaggggaccaagaaaattagtaatggttaattgctggcctcagattgtccttatgttcctgagttatgatccttgagtaatgctttgattttaatagttggttctgtgttgcaacatatatctttagtgctgacactaactttgtccaactctgtctgtaagctggagcatttttctgatgccagctgaatattagagctgaaaacacatttgttgatatttgtcttgtccacattgtgatgttcagtatttgagcttatagtgaactgagcaatcataaataagccacccttctgattgtcgttctactgtat

SEQ ID NO: 367 - DNA, 492 bp, Homo sapiens
  misc_feature (1)..(492): 204794_at
ctgctacctcctcagagtttcagaagcccccacatgggggctctaggaatgccggcatgctggtctttccgacctggtgctcttctgctgggggactgaggctggccctcattcggggtcgggaaccaagggtgtgtctgctctttccctccccatcctctggcagaaatcagctagacgctataccgtggactctccctggtccaccaccatgttgaagcccttggcagcctgagagctccaaggaacaagctgtgacaaccaggagccctgtctgtgggttcgtctgcccagggcctggagcccaagccctgtgttcctggggaagctggggacttgggaagtgatgggtgtgtcatgttgcgtgtgtctgtctgtgagcctttcacacctgtgctggcgctggaaaattatttgtgctcagctgacatttaacacttcctcccccgcttcctcctagccctgtgggcaggggttggaaacttagcactt

SEQ ID NO: 368 - DNA, 503 bp, Homo sapiens
  misc_feature (1)..(503): 204798_at
gctgctatggtcttagcctgtagacatgctgctagtatcagaggggcagtagagcttggacagaaagaaaagaaacttggtgttaggtaattgactatgcactagtatttcagactttttaattttatatatatatacattttttttccttctgcaatacatttgaaaacttgtttgggagactctgcattttttattgtggtttttttgttattgttggtttatacaagcatgcgttgcacttcttttttgggagatgtgtgttgttcatgttctatgttttgttttgtgtgtagcctgactgttttataatttgggagttctcgatttgatccgcatcccctgtggtttctaagtgtatggtctcagaactgttgcatggatcctgtgtttgcaactggggagacagaaactgtggttgatagccagtcactgccttaagaacatttgatgcaagatggccagcactgaacttttgagatatgacggtgtacttactgcct

SEQ ID NO: 369 - DNA, 189 bp, Homo sapiens
  misc_feature (1)..(189): 204838_s_at
ccctgactgaatcagcccagtgtccctgagcagcttagacagcagggctctctgtatcagtctttcttgagcagatgattcccctagttgagtagccagatgaaattcaagcctaaagacaattcattcatttgcatccatgggcacagaaggttgctatatagtatctaccttttgctacttatttaa

SEQ ID NO: 370 - DNA, 492 bp, Homo sapiens
  misc_feature (1)..(492): 204847_at
ctcctcaagctatccaattttctgactttgaaaataaccatgagagatgccacatttctctctgggaaactaccactcaaagaataattgttaaaaattaagcttttaggtattagaagctgttataaagtataaaattaagatataagcagatcacatgtaaatcattcctaaagcacaagaaaagaatgtgccttgatgtacatatattactaagttgcctctcccagtttactttaaaaatggctttaaggataaagaataaatgtgatagctgtgcatgcattatatatttgcatttgcaaatttcccattgttttaacagctgtgtggctgactttcaattttaagacgtgaattgacatacagcccataactttataatggctgctcatttatcttatctttcagttagtggaaaaacatttcaacctgactaaaatttggaattgtgtctttttatgttccatcctctgttgttactagatttag

SEQ ID NO: 371 - DNA, 521 bp, Homo sapiens
  misc_feature (1)..(521): 204848_x_at
acactcgcttctggaacgtctgagattatcaataagctcctagtccagacgccatgggtcatttcacagaggaggacaaggctactatcacaagcctgtggggcaaggtgaatgtggaagatgctggaggagaaaccctgggaaggctcctggttgtctacccatggacccagaggttctttgacagctttggcaacctgtcctctgcctctgccatcatgggcaaccccaaagtcaaggcacatggcaagaaggtgctgacttccttgggagatgccataaagcacctggatgatctcaagggcacctttgcccagctgagtgaactgcactgtgacaagctgcatgtggatcctgagaacttcaagctcctgggaaatgtgctggtgaccgttttggcaatccatttcggcaaagaattcacccctgaggtgcaggcttcctggcagaagatggtgactgcagtggccagtgccctgtcctccagataccactgagcctcttgcccatgattcagagct

SEQ ID NO: 372 - DNA, 168 bp, Homo sapiens
  misc_feature (1)..(168): 204885_s_at
tttccagaacatgaacgggtccgaatacttcgtgaagatccagtccttcctgggtggggcccccacggaggatttgaaggcgctcagtcagcagaatgtgagcatggacttggccacgttcatgaagctgcggacggatgcggtgctgccgttgactgtggctgaggt

SEQ ID NO: 373 - DNA, 541 bp, Homo sapiens
  misc_feature (1)..(541): 204890_s_at
ctagtggattttctcaagaccccttcaggcatcaagttgaccatcaacaaactcctggacatggcagcccaaattgcagaaggcatggtattcattgaagagcggaattatattcatcgtgaccttcgggctgccaacattctggtgtctgacaccctgagctgcaagattgcagactttggcctagcacgcctcattgaggacaacgagtacacagccagggagggggccaagtttcccattaagtggacagcgccagaagccattaactacgggacattcaccatcaagtcagatgtgtggtcttttgggatcctgctgacggaaattgtcacccacggccgcatcccttacccagggatgaccaacctggaggtgattcagaacctggagcgaggctaccgcatggtgcgccctgacaactgtccagaggagctgtaccaactcatgaggctgtgctggaaggagcgcccagaggaccggcccacctttgactacctgcgcagtgtgctggaggacttcttcacggccacagagggcc

SEQ ID NO: 374 - DNA, 342 bp, Homo sapiens
  misc_feature (1)..(342): 204891_s_at
gacttggggagatggagttcttgtgccatagtcacatggcctatgcacatatggactctgcacatgaatcccacccacatgtgacacatatgcaccttgtgtctgtacacgtgtcctgtagttgcgtggactctgcacatgtcttgtgcatgtgtagcctgtgcatgtatgtcttggacactgtacaaggtacccctttctggctctcccatttcctgagaccaccagagagaggggagaagcctgggattgacagaagcttctgcccacctacttttctttcctcagatcatccagaagttcctgaagggccaggactttatctaatacctctgtgtgctc

SEQ ID NO: 375 - DNA, 484 bp, Homo sapiens
  misc_feature (1)..(484): 204900_x_at
gagcgcaaggcatctttacatatgtgattatcataaaaacttaattcagagtgttcgaaacagaagaaagagaaaagggagtgatgatgatggaggtgattcacctgttcaagatattgataccccagaggttgatttataccaattacaagtaaatacacttaggagatacaaaagacacttcaagctaccaaccagaccaggacttaataaagcacaacttgttgagatagttggttgccactttaggtctattccagtgaatgaaaaagacaccttaacatatttcatctactcagtgaagaatgacaagaacaaatcagatctcaaggttgatagtggtgttcactaggagacgtggaattgagactaataacttggatgttaacactgtttactgttttttcacatgtagaaatgttctttgtgtattttttctacagaggattttctctgattttattttctttgtttctgactctaa

SEQ ID NO: 376 - DNA, 324 bp, Homo sapiens
  misc_feature (1)..(324): 204905_s_at
ggttagaatacagggtcactcaagtagatgggcactccagtaaaaatgacatccacacactgttgaaggatcttaattcatatcttgaagataaagtctaccttacagggtataactttacattagcagatatactattgtactatggacttcatcgctttatagttgacctgacagttcaagaaaaggagaaatatcttaatgtgtctcgctggttttgtcacattcagcattatccaggcatcaggcaacatctgtctagtgttgtcttcatcaagaacagactatatactaattcccactagaagctgtccatgccataca

SEQ ID NO: 377 - DNA, 474 bp, Homo sapiens
  misc_feature (1)..(474): 204951_at
attaggagcaacttgccctgtacccctgtgctggtggtggccacccagactgaccagcgggagatggggccccacagggcctcctgcgtcaatgccatggaagggaagaaactggcccaggatgtcagagccaagggctacctggagtgctcagcccttagcaatcggggagtacagcaggtgtttgagtgcgccgtccgaactgccgtcaaccaggccaggagacgaaacagaaggaggctcttctccatcaatgagtgcaagatcttctaaaccccaagagacttcacacaacacttatgtatgcaccccaaagactaatggggagagggagggccgggaagccaggaaagcttggtgttttctctgggtacaccccaagcagcgtctccgttttggatacagttattgatgaggcttggccactggatgttttcactaactacactctacaagtgaactccttgcccaggc

SEQ ID NO: 378 - DNA, 556 bp, Homo sapiens
  misc_feature (1)..(556): 205019_s_at
gcagccaccagcgaatgctaggtctcggactaagcctacctgctctccaagtctcagtggcttcatctgtcaagtgggactctgtcacaccagccattcttatctctctgtgctgtggaagcaacaggaatcaagagactgccctccttgtccacccacctatgtgccaactgttgtaactaggctcagagatgtgcacccatgggctctgacagaaagcagatcctcaccctgctacacatacaggatttgaactcagatctgtctgataggaatgtgaaagcacggactcttactgctaacttttgtgtatcgtaaccagccagatcctcttggttatttgtttaccacttgtattattaatgccattatccctgaattccccttgccaccccaccctccctggagtgtggctgaggaggcctccatctcatgtatcatctggataggagcctgctggtcacagcctcctctgtctgcccttcaccccagtggccactcagcttcctacccacacctctgccagaagatcccctcaggactgcaacaggcttgt

SEQ ID NO: 379 - DNA, 389 bp, Homo sapiens
  misc_feature (1)..(389): 205022_s_at
cttgtggcaccaggcatctgatggtgccaggaaagccactggaattgtcacacggcgagcacagagggccggccaccagtcctcgatgcttctgaaccctgaaccccgatgacatcttacgaggtggacgttggactgttcatgcgcatcgggtgtcagtgactcatggagaagaaatggggtaaatttttagtgatgttgctaatcattgaattctgttctctattaaattaagaaaatgttccaaaagccataagcctgaagattggccctgtgcacgcacgcacacacacacacacacacacacacacacacacacacacacgaaggagagagagagaaaactgatggggaaaacaagctgtgtcttcttaactgcccaagtgaaa

SEQ ID NO: 380 - DNA, 538 bp, Homo sapiens
  misc_feature (1)..(538): 205051_s_at
caggtatgttgcctttatggtttcccccttctacatttcttagactacatttagagaactgtggccgttatctggaagtaaccatttgcactggagttctatgctctcgcacctttccaaagttaacagattttggggttgtgttgtcacccaagagattgttgtttgccatactttgtctgaaaaattcctttgtgtttctattgacttcaatgatagtaagaaaagtggttgttagttatagatgtctaggtacttcaggggcacttcattgagagttttgtcttgccatactttgtctgaaaaattcctttgtgtttctattgacttcaatgatagtaagaaaagtggttgttagttatagatgtctaggtacttcaggggcacttcattgagagttttgtcaatgtcttttgaatattcccaagcccatgagtccttgaaaatattttttatatatacagtaactttatgtgtaaatacataagcggcgtaagtttaaaggatgttggtgttccacgtgttttattcctgtatg

SEQ ID NO: 381 - DNA, 537 bp, Homo sapiens
  misc_feature (1)..(537): 205070_at
aagattgccctatagaatggttccattatggctgcgttggattgacagaggcaccaaaaggcaaatggtactgtccacagtgcactgctgcaatgaagagaagaggcagcagacacaaataaaggtggtccttttgtttgatgaagaaataaacttcagctgaagattttatataggactttaaaaagaagagaagagaaagaagaaacaatgcatttccaggcaaccacttaaaggatttacatagacaatcctataagatcttgaacttgaattttatgggttgtattttaataatgtaagtaaattatttatgcactcctggtgtgctatgaatattattccagttagccttggattatttcagtggccaacatatgcagacatttgtactcctcaaccattttctcaaagtaatgggcattctatgatttagacttcaaggaattccaatgatgaagattttaaggaaagtattttatattcaacaggtatattctgctgcatgtactgtactccagagctgttatgtaacac

SEQ ID NO: 382 - DNA, 507 bp, Homo sapiens
  misc_feature (1)..(507): 205114_s_at
gattccacagaatttcatagctgactactttgagacgagcagccagtgctccaagcccggtgtcatcttcctaaccaagcgaagccggcaggtctgtgctgaccccagtgaggagtgggtccagaaatatgtcagcgacctagagctgagtgcctgaggggtccagaagcttcgaggcccagcgacctcggtgggccagtggggaggagcaggagcctgagccttgggaaacatgcgtgtgacctccacagctacctcttctatggactggttgttgccaaacagccacactgtgggactcttcttaacttaaattttaatttatttatactatttagtttttgtaatttattttcgatttcacagtgtgtttgtgattgtttgctctgagagttcccctgtcccctcccccttccctcacaccgcgtctggtgacaaccgagtggctgtcatcagcctgtgtaggcagtcatggcaccaaagccaccagactgacaaatgtgtatc

SEQ ID NO: 383 - DNA, 558 bp, Homo sapiens
  misc_feature (1)..(558): 205131_x_at
cggcagaccgccagcagatggaggcgctcactcggtacctgcgcgcggcgctcgctccctacaactggcccgtgtggctgggcgtgcacgatcggcgcgccgagggcctctacctcttcgaaaacggccagcgcgtgtccttcttcgcctggcatcgctcaccccgccccgagctcggcgcccagcccagcgcctcgccgcatccgctcagcccggaccagcccaacggtggcacgctcgagaactgcgtggcgcaggcctctgacgacggctcctggtgggaccacgactgccagcggcgtctctactacgtctgcgagttccccttctagcggggccggtaccccgcctccttgcccatcccaccacccggcctttccctgcgccgtgcccaccctcctccggaatcgcccttcccttcctggccacgaatggcagcgtcctccccgacccccagtctgggcgcttctgggagggctcttgcggtgccggcactcctccttgttagtgtctttccttgaaggggcgggcaccaggctaggtccggtgccaataaat

SEQ ID NO: 384 - DNA, 319 bp, Homo sapiens
  misc_feature (1)..(319): 205202_at
aatagagatgagctttctttttaaagcttttgatgtggtgtcatagaatagcatgttgtagatacaatcagctgctttgttaccttaaaactaggcatttgtaaatattaaaccttaagatggcaggtgatgtcctgtaaacactcagctgttcagattggacataactgacttagttcttcccttctctctctctcaaaattataggagacttgtagtttagtgtggttttctgtttctaatttgctgctgataatgtatatgaacttaacatgctgtgtaagctgtgtcctagttcttgaacagtttatgcagtgct

SEQ ID NO: 385 - DNA, 418 bp, Homo sapiens
  misc_feature (1)..(418): 205237_at
gagggcaaccaccagtttgctaagtacaaatcattcaaggtggctgacgaggcagagaagtacaagctggtactgggagcctttgtcgggggcagtgcgggtaattctctaacgggccacaacaacaacttcttctccaccaaagaccaagacaatgatgtgagttcttcgaattgtgctgagaagttccagggagcctggtggtacgccgactgtcatgcttcaaacctcaatggtctctacctcatgggaccccatgagagctatgccaatggtatcaactggagtgcggcgaaggggtacaaatatagctacaaggtgtcagagatgaaggtgcggcccgcctagacgggccaggacccctccacatgcacctgctagtggggaggccacacccacaagcgctgcgtcgtggaag

SEQ ID NO: 386 - DNA, 472 bp, Homo sapiens
  misc_feature (1)..(472): 205239_at
atttcaaaatttctgcattcacggagaatgcaaatatatagagcacctggaagcagtaacatgcaaatgtcagcaagaatatttcggtgaacggtgtggggaaaagtccatgaaaactcacagcatgattgacagtagtttatcaaaaattgcattagcagccatagctgcctttatgtctgctgtgatcctcacagctgttgctgttattacagtccagcttagaagacaatacgtcaggaaatatgaaggagaagctgaggaacgaaagaaacttcgacaagagaatggaaatgtacatgctatagcataactgaagataaaattacaggatatcacattggagtcactgccaagtcatagccataaatgatgagtcggtcctctttccagtggatcataagacaatggaccctttttgttatgatggttttaaactttcaattgtcactttttatgctatttctgtata

SEQ ID NO: 387 - DNA, 404 bp, Homo sapiens
  misc_feature (1)..(404): 205241_at
atctgcccagacgagctggagaagctggtgcaggtggtgcggcagctggaagcagagcctggtttgcctccagtgcagcctgtcttcatcactgtggaccccgagcgggacgacgttgaagccatggcccgctacgtccaggacttccacccaagactgttgggtctgaccggctccaccaaacaggttgcccaggctagtcacagttaccgcgtgtactacaatgccggccccaaggatgaggaccaggactacatcgtggaccactccattgccatctacctgctcaaccctgacggcctcttcacggattactacggccggagcagatcggctgagcagatctcagacagtgtgcggcggcacatggcggctttccgcagtgtcctgtcttgagccactgc

SEQ ID NO: 388 - DNA, 537 bp, Homo sapiens
  misc_feature (1)..(537): 205254_x_at
  misc_feature (233)..(233): n is a, c, g, or t
  misc_feature (236)..(236): n is a, c, g, or t
tggcctcaaccagcagacggattggtgtggtccgtgcagataactctcttcactattcctaggaggaaaaagaaatgcattcggtacttacccggagaaggccgctgccccagccccgttccttccgatgacagtgctctaggctgccccgggtccccagctccccaggactcaccctcataccatctgctgccccgcttccccacagaactgcttactagccctgcggagcnggncacctacatccccaggtctctccactgctctcagcctcccaaccccagggcccccacaggccccccgcagcaccctgcagagcacacaggtacagcaacaggaatctcagagacaggtggcctagcaggcacaggacacctggccgcctccaggagcctaccccctgaaagtgacagagacccagatctcatggaaactggccaggggtcctgttaacgtcatctcagggtccagaccctgaagatttcagaggctgcagaacttctgcctgaacctggggtcatcgattcaaactgctcc

SEQ ID NO: 389 - DNA, 422 bp, Homo sapiens
  misc_feature (1)..(422): 205255_x_at
caaagaaaaagggctgccgggccaggcgcggtcgtcacgcctgtaatcccagcactttggcaggccgaggcaggtggatcacctgacgtcagtagtttgagaccagcctggccaacatggtgaaaccctgtatctactaaaaatacaaaaattagccggacgtggtggtgcgcgcatgtaatcccagctactcgggaggctgaggcggaagaatcacttgaacccgggaggcggaggttccagtgagccgagatggcgctattgcactccagtctgggtaacagggagactgcatctcaaaaaaaaaaaaaaaaaaaaagggctgtccatgtattcacacacccctcaaaaaaagcctttagttcctactttagccactggtttctcagaatccaaagatcacatattctagtgtaacactg

SEQ ID NO: 390 - DNA, 421 bp, Homo sapiens
  misc_feature (1)..(421): 205281_s_at
aaatggactgatctttaaactattcagtcttactgggatttttatgcatagaaactcacatataaacatgaaataaacagtgccagtattcataggaaagtgagaaactgtaatatttggccattattctattcaacaggttttagaggcatgccaccattttttccttatatttttgcttaatttttttaaattgtcatttaattcttaaactgtcatttatttgagatggaaataagatctaaagttagttgcctttgcctgtaaaacatgtgatttgcaaattattattttcctttttttttaacaaatggaagtaaatttgtttcacgtaaatcttaattttcaacctttctggataccttaattgtaactgtcagtttgcactggtcggtatatggaaacacattgctctaccctg

SEQ ID NO: 391 - DNA, 442 bp, Homo sapiens
  misc_feature (1)..(442): 205291_at
gacaagcgttgagccactaagcagaggaccttgggttcccaatacaaaaatacctactgctgagagggctgctgaccatttggtcaggattcctgttgcctttatatccaaaataaactcccctttcttgaggttgtctgagtcttgggtctatgccttgaaaaaagctgaattattggacagtctcacctcctgccatagggtcctgaatgtttcagaccacaaggggctccacacctttgctgtgtgttctggggcaacctactaatcctctctgcaagtcggtctccttatccccccaaatggaaattgtatttgccttctccactttgggaggctcccacttcttgggagggttacattttttaagtcttaatcatttgtgacatatgtatctatacatccgtatcttttaatgatccgtgtgtaccatctttgtgat

SEQ ID NO: 392 - DNA, 368 bp, Homo sapiens
  misc_feature (1)..(368): 205330_at
gcttaaggccggggagcaaagtgtcttaacttctgtctttgactttcccagcgttgagtcatcaacactttgccaattagctcatggtcctggcaacctcagaaacccctgaagttttaaaaactttctcgctccccacgaccccagaatgaaacagctttaaaaatagccttaagcaaaaggatgttatttcattaaatttggtttaatggaaagaataaaagtaaatgaaaaacacaccctacacactagactccgaacactggtaatcagtactgcatagcaaactctttgggaaagaaaacgaaaatgttattgcacatgtaaaatatgaaaacttaactctgctgtgtgttaggcaatcctgt

SEQ ID NO: 393 - DNA, 434 bp, Homo sapiens
  misc_feature (1)..(434): 205349_at
aacggccatttgggatgccagggtggatgaaaaggtgaagaaatcaggggattgagacttgggtgggtgggcatctctcaggagccccatctccgggcgtgtcacctcctgggcagggttctgggaccctctgtgggtgacgcacaccctgggatggggctagtagagccttcaggcgccttcgggcgtggactctggcgcactctagtggacaggagaaggaacgccttccaggaacctgtggactaggggtgcagggacttccctttgcaaggggtaacagaccgctggaaaacactgtcactttcagagctcggtggctcacagcgtgtcctgccccggtttgcggacgagagaaatcgcggcccacaagcatcccccatcccttgcaggctgggggctgggcatgctgcatcttaaccttttgtatttat

SEQ ID NO: 394 - DNA, 317 bp, Homo sapiens
  misc_feature (1)..(317): 205382_s_at
cgccatcaccgagcgcttgatgtgcgcggagagcaatcgccgggacagctgcaagggtgactccgggggcccgctggtgtgcgggggcgtgctcgagggcgtggtcacctcgggctcgcgcgtttgcggcaaccgcaagaagcccgggatctacacccgcgtggcgagctatgcggcctggatcgacagcgtcctggcctagggtgccggggcctgaaggtcagggtcacccaagcaacaaagtcccgagcaatgaagtcatccactcctgcatctggttggtctttattgagcacctactatatgcagaaggggag

SEQ ID NO: 395 - DNA, 488 bp, Homo sapiens
  misc_feature (1)..(488): 205418_at
aggaagccgatggggtctatgcagcctcagggggcctcagacaagtccccgtgaagtggaccgcacctgaggcccttaactacggccgctactcctccgaaagcgacgtgtggagctttggcatcttgctctgggagaccttcagcctgggggcctccccctatcccaacctcagcaatcagcagacacgggagtttgtggagaaggggggccgtctgccctgcccagagctgtgtcctgatgccgtgttcaggctcatggagcagtgctgggcctatgagcctgggcagcggcccagcttcagcaccatctaccaggagctgcagagcatccgaaagcggcatcggtgaggctgggacccccttctcaagctggtggcctctgcaggcctaggtgcagctcctcagcggctccagctcatatgctgacagctcttcacagtcctggactcctgccaccagcatccacactgccggcaggatgcagcg

SEQ ID NO: 396 - DNA, 520 bp, Homo sapiens
  misc_feature (1)..(520): 205419_at
cagcccctgaagaaaattcacgtgaaatgacagaaacgcagatgatgatacattccaagtcttcaaatggaaagtgaaatggattgtattttggtttatagtgacgtaaactgtatgacaaactttgcaggacttcccttataaagcaaaataattgttcagcttccaattagtattcttttatatttctttcattgggcgctttcccatctccaactcggaagtaagcccaagagaacaacataaagcaaacaacataaagcacaataaaaatgcaaataaatattttcatttttatttgtaaacgaatacaccaaaaggaggcgctcttaataactcccaatgtaaaaagttttgttttaataaaaaattaattattattcttgccaacaaatggctagaaaggactgaatagattatatattgccagatgttaatactgtaacatactttttaaataacatatttcttaaatccaaatttctctcaatgttagatttaattccctcaataacaccaa

SEQ ID NO: 397 - DNA, 449 bp, Homo sapiens
  misc_feature (1)..(449): 205453_at
cccgggccattgccagaagacgtcttctcggggcgccaggattcacctttccttcccgacctcaacttcttcgcggccgactcctgtctccagctatccggaggcctctcccctagcctacagggttctctcgacagcccggtccctttttccgaggaagagctggattttttcaccagtacgctctgtgccatcgacctgcagtttccctaacctgtttcctcctcccggtcctttcgacccccgcgctccttggccgtctactggaaaaatcgagcctctcccaccctcagtcgcatagacttatgtgttttgctaaaattcaggtattactgaattagcgtttaatccacttcctttcttcttcttctaaaatattgggcactcggttatcttttaaaattcacacagaaaaattccgtttggtagactccttccaatgaaatctc

SEQ ID NO: 398 - DNA, 419 bp, Homo sapiens
  misc_feature (1)..(419): 205495_s_at
ctcgtctgagccctgagtactacgacctggcaagagcccacctgcgtgatgaggagaaatcctgcccgtgcctggcccaggagggcccccagggtgacctgttgaccaaaacacaggagctgggccgtgactacaggacctgtctgacgatagtccaaaaactgaagaagatggtggataagcccacccagagaagtgtttccaatgctgcgacccgggtgtgtaggacggggaggtcacgatggcgcgacgtctgcagaaatttcatgaggaggtatcagtctagagttacccagggcctcgtggccggagaaactgcccagcagatctgtgaggacctcaggttgtgtataccttctacaggtcccctctgagccctctcaccttgtcctgtggaagaagcacaggctcctgtcctc

SEQ ID NO: 399 - DNA, 510 bp, Homo sapiens
  misc_feature (1)..(510): 205505_at
  misc_feature (355)..(355): n is a, c, g, or t
  misc_feature (356)..(356): n is a, c, g, or t
cccttccttgtcagcgtcgggaagatggtatgaagtcctctttggggcagggactctagtagatcttcttgtcagagaagctgcatggtttctgcagagcacagttagctagaaaggtgatagcattaaatgttcatctagagttaatagtgggaggagtaaaggtagccttgaggccagagcaggtagcaaggcattgtggaaagaggggaccagggtggctggggaagaggccgatgcataaagtcagcctgttccaagtgctcagggacttagcaaaatgagaagatgtgacctgtgccaaaactattttgagaattttaaatgtgaccatttttctggtatgccaataaanncttacagcaacaaataatcaaagatacaattaatctgatattatatttgttgaaatagaaatttgattgtactataaatgatttttgtaaataatttatattctgctctaatactgtactgtgtagtgtgtctccgtatgtcatctcagggagc

SEQ ID NO: 400 - DNA, 470 bp, Homo sapiens
  misc_feature (1)..(470): 205513_at
aacaaagactcttcttgcgtctctgcttcaggtaacttcaacatctccgctgatgagcctataactgtgacacctcctgactcacaatcatatatctccgtcaattactctgtgagaatcaatgaaacatatttcaccaatgtcactgtgctaaatggttctgtcttcctcagtgtgatggagaaagcccagaaaatgaatgatactatatttggtttcacaatggaggagcgctcatgggggccctatatcacctgtattcagggcctatgtgccaacaataatgacagaacctactgggaacttctgagtggaggcgaaccactgagccaaggagctggtagttacgttgtccgcaatggagaaaacttggaggttcgctggagcaaatactaataagcccaaactttcctcagctgcataaaatccatttgcagtggagttccatgtttattgtccttatgccttct

SEQ ID NO: 401 - DNA, 504 bp, Homo sapiens
  misc_feature (1)..(504): 205518_s_at
tcaagaattcactgatctgatgcaaaataaaaatttatcattacatcttgaacccaggaagcttacagcaaagagactatgctttatgacgtcagcaatagataattccacgttgcctttgtgatttgtatatatagcttacatttgtggaccactacatagccagattcaaaaatattttacttgttccatccacagttctctacagaaagaaccaatgaacccaataggaacaaattctctgtggaaaacaaagcatagctgtagtagatacgaatccaatcacagaggaaacaggaagagaaaaacatccaagactacagtgaaaactggaaatggtctgttttcgtgatattcgtatgattaagatgcaaattttttcttaggaaaatgtgattgttaactagcattctgttttacatgttgacatttctaacacacacaccactgatttgaacttcaaaatttattttctgattatatatgctaggtctgattctgaag

SEQ ID NO: 402 - DNA, 496 bp, Homo sapiens
  misc_feature (1)..(496): 205557_at
ctcaagctggataggctgctcctggaactgaagcactcaaatattggccccttcccggttgaattgctgcaggatatcatgaactacattgtacccattcttgtgctgcccagggttaacgagaaactacagaaaggcttccctctcccgacgccggccagagtccagctctacaacgtagtgcttcagcctcaccagaacttcctgctgttcggtgcagacgttgtctataaatgaaggcaccaggggtgccgggggctgtcagccgcacctgttcctgatgggctgtggggcaccggctgcctttccccagggaatcctctccagatcttaaccaagagccccttgcaaacttcttcgactcagattcagaaatgatctaaacacgaggaaacattattcattggaaaagtgcatggtgtgtattttagggattatgagcttctttcaagggctaaggctgcagagatatttcctccaggaatcgtgtttcaat

SEQ ID NO: 403 - DNA, 422 bp, Homo sapiens
  misc_feature (1)..(422): 205592_at
tgggggccacagactcaacatgtgtgtgtggtggggttccagcccaacatagagtaacattatttgtacctcccaggctagctcagtccatgggaggctctcctgtccctgaaagctgacacccacctttcaccacttcgcccatgctacagttcagtttcctcgtctgtaaaatggggatgataatggtacctaccttgcagtgttgttataaggattaaaggagacagtgcaagaaaaggccttggttggtgaagagcccaacctcggaggggagctgctgggatcctccttatcttgactgggatgtccctgtctccccctccccttgctccttgaacatggccaaggaaagtgaaaaacaaaaattattcactctgctagcacccttccccttgatgcctgggaataggttttgccaa

SEQ ID NO: 404 - DNA, 576 bp, Homo sapiens
  misc_feature (1)..(576): 205600_x_at
  misc_feature (412)..(412): n is a, c, g, or t
gaggaagcttcacatcagccatgatatgaccgggccggacgggaaaagggcccggaccgcgtatacccgctaccagaccctggagctggaaaaggagttccacttcaaccgctacctgacccggcgacggcgcatcgagatcgcccacgcactctgcctgtccgagcgccagatcaagatctggttccagaaccggcgcatgaagtggaagaaggacaacaaattgaaaagtatgagcctggctacagctggcagcgccttccagccctgagcccgcccagaggagcccagcggcccaagagcccgtgccacccccagccctggcccctccaatcctccccgctctgccgccgcccgctggggaccggttcccacaagcctgcctcgccttgtgttacgatatttcgtttgntcttaggtcttcctgtggctccctctctcctggactggttatcttgttattattgttaataataataattattattattttccttccatgctcccaactcccttctgcttgtcccaaatccgccagtgtttctgaatgtttgtgtctgtggttgcagtctttcc

SEQ ID NO: 405 - DNA, 548 bp, Homo sapiens
  misc_feature (1)..(548): 205601_s_at
tccccatctgtgttctaacttatttataaaagatgatcgctgtattttgagtttcagctggaaacttctgtaaggggcagcagttgaggtggggtagtgccgcagtggggtcaagctgagctggcttcggagatggagtcccttttcattctcctcctcctccctcctcactccctaggcccaagtctcctaggggcttggtcctagggtgggaaggggctagggaggaccaaagggatggtattgagaagagagaaagaagatagtgagatttaagttcctgctgcctgggtaggccccacaaggcctggtctgggagtatacggaaacaaaaatgatcctcagtgcaaaatgtcttgtgtatttctctgtgaatccatgggtctggctagagggcccaaagcttgtaaatatggggatagtctgggtcagacccatctctcccttacccatcttgcttccaagaccatttgtagtgagcgagtggatgctgtgctacgtgtgaaatctgtctttgcggggcctgtctcagtgattcgcttttggta

SEQ ID NO: 406 - DNA, 547 bp, Homo sapiens
  misc_feature (1)..(547): 205608_s_at
agagcagcctgatcttacacggtgctgatttcagcactaaagatgctgataatgacaactgtatgtgcaaatgtgccctcatgttaacaggaggatggtggtttgatgcttgtggcccctccaatctaaatggaatgttctatactgcgggacaaaaccatggaaaactgaatgggataaagtggcactacttcaaagggcccagttactccttacgttccacaactatgatgattcgacctttagatttttgaaagcgcaatgtcagaagcgattatgaaagcaacaaagaaatccggagaagctgccaggtgagaaactgtttgaaaacttcagaagcaaacaatattgtctcccttccagcaataagtggtagttatgtgaagtcaccaaggttcttgaccgtgaatctggagccgtttgagttcacaagagtctctacttggggtgacagtgctcacgtggctcgactatagaaaactccactgactgtcgggctttaaaaagggaagaaactgctgagcttgctgtgcttcaaactactact

SEQ ID NO: 407 - DNA, 528 bp, Homo sapiens
  misc_feature (1)..(528): 205609_at
gtttaccatcaagtcttttttatatttatgtgtctgtattctacccctttttgccttacaagtgatatttgcaggtattataccatttttctattcttggtggcttcttcatagcaggtaagcctctccttctaaaaacttctcaactgttttcatttaagggaaagaaaatgagtattttgtccttttgtgttcctacagacactttcttaaaccagtttttggataaagaatactatttccaaactcatattacaaaaacaaaataaaataataaaaaaagaaagcatgatatttactgttttgttgtctgggtttgagaaatgaaatattgtttccaattatttataataaatcagtataaaatgttttatgattgttatgtgtattatgtaatacgtacatgtttatggcaatttaacatgtgtattcttttcatttaattgtttcagaataggataattaggtattcgaattttgtctttaaaattcatgtggtttctatgcaaagttcttcatatcatcaca

SEQ ID NO: 408 - DNA, 525 bp, Homo sapiens
  misc_feature (1)..(525): 205612_at
gatagggttttaactggggatgccttattagaattaaattatgggcaggaagtctggttacgacttgcaaaaggaacaattccagccaagtttccccctgttactacatttagtggctatttattatatcgtacataagttagtatgaaaaacagactatcacctttattgagaaacagccagtgttttcatttatctttgcttgcacatctgctctgttttggtttttctacaggaaatgaaaatcaacttgtttttttaatatgagtaaacttgtatgtctattttataaaattatttgaatattgtttaatgtctgaatatgaaagagttcttgatcctaaagaaatttagtggcacagaaaacaaagtgaatttgttagcataattattcctattcttatttcttcattttaagtcattgcaatggaaagtaatattataaaacggtaattacaacatattatcagtcacagttttctttccaattaaacacttaacttttgttattccctgtatataaat

SEQ ID NO: 409 - DNA, 565 bp, Homo sapiens
  misc_feature (1)..(565): 205624_at
tatgaaacccgctacatctatggcccaatagaatcaacaatttacccgatatcaggttcttctttagactgggcttatgacctgggcatcaaacacacatttgcctttgagctccgagataaaggcaaatttggttttctccttccagaatcccggataaagccaacgtgcagagagaccatgctagctgtcaaatttattgccaagtatatcctcaagcatacttcctaaagaactgccctctgtttggaataagccaattaatccttttttgtgcctttcatcagaaagtcaatcttcagttatccccaaatgcagcttctatttcacctgaatccttctcttgctcatttaagtcccatgttactgctgtttgcttttacttactttcagtagcaccataacgaagtagctttaagtgaaaccttttaactacctttctttgctccaagtgaagtttggacccagcagaaagcattattttgaaaggtgatatacagtggggcacagaaaacaaatgaaaaccctcagtttctcacagattttcaccatgtggcttcatcaa

SEQ ID NO: 410 - DNA, 533 bp, Homo sapiens
  misc_feature (1)..(533): 205653_at
gccaccctcaatataatcagcggaccatccagaatgacatcatgttattgcagctgagcagaagagtcagacggaatcgaaacgtgaacccagtggctctgcctagagcccaggagggactgagacccgggacgctgtgcactgtggccggctggggcagggtcagcatgaggaggggaacagatacactccgagaggtgcagctgagagtgcagagggataggcagtgcctccgcatcttcggttcctacgacccccgaaggcagatttgtgtgggggaccggcgggaacggaaggctgccttcaagggggattccggaggccccctgctgtgtaacaatgtggcccacggcatcgtctcctatggaaagtcgtcaggggttcctccagaagtcttcaccagggtctcaagtttcctgccctggataaggacaacaatgagaagcttcaaactgctggatcagatggagacccccctgtgactgactcttcttctcggggacacaggccagctccacagtgttgccagagcc

SEQ ID NO: 411 - DNA, 542 bp, Homo sapiens
  misc_feature (1)..(542): 205683_x_at
tgacgcaaaataccaccttggcgcctacacgggagacgacgtccgcatcgtccgtgacgacatgctgtgtgccgggaacacccggagggactcatgccagggcgactccggagggcccctggtgtgcaaggtgaatggcacctggctgcaggcgggcgtggtcagctggggcgagggctgtgcccagcccaaccggcctggcatctacacccgtgtcacctactacttggactggatccaccactatgtccccaaaaagccgtgagtcaggcctgggttggccacctgggtcactggaggaccaacccctgctgtccaaaacaccactgcttcctacccaggtggcgactgccccccacaccttccctgccccgtcctgagtgccccttcctgtcctaagccccctgctctcttctgagccccttcccctgtcctgaggacccttccctatcctgagcccccttccctgtcctaagcctgacgcctgcaccgggccctccagccctcccctgcccagatagctggtggtgggcgctaatcct

SEQ ID NO: 412 - DNA, 496 bp, Homo sapiens
  misc_feature (1)..(496): 205711_x_at
ccccccacttttggagatgcgtcagtcattgcccttgaattactaaattctggatatgaatttgatgaaggctccatcatctttaataaattcaggtctgtcatctcctataagacagaagaaaagcccatcttttcccttaataccgttgcaagtgctgacagcatgagtatctatgacgatattgatgctgacgtgctgcaaaattaccaagaatacaatctggccaacatcatctactactctctgaaggagtccaccactagtgagcagagtgccaggatgacagccatggacaatgccagcaagaatgcttctgagatgattgacaaattgacattgacattcaaccgtacccgccaagctgtcatcacaaaagagttgattgaaattatctctggtgctgcagctctgtaaagaaggaaaattcagccagttgattttgtttttagcttactgctgcctttgtccgaagaaactgttcctccattatttg

SEQ ID NO: 413 - DNA, 530 bp, Homo sapiens
  misc_feature (1)..(530): 205769_at
atgtgccagatcatgagggtcgcattggcatggcctccatcaaaatgaaagaaaaccatgaatttgatggaaagaaactctttcagcacattgctgattacctacctagttatgcaaggccccggtttctaagaatacaggacaccattgagatcactggaacttttaaacaccgcaaaatgaccctggtggaggagggctttaaccctgctgtcatcaaagatgccttgtatttcttggatgacacagcaaaaatgtatgtgcctatgactgaggacatctataatgccataagtgctaaaaccctgaaactctgaatattcccaggaggataactcaacatttccagaaagaaactgaatggacagccacttgatataatccaactttaatttgattgaagattgtgaggaaattttgtaggaaatttgcatacccgtaaagggagacttttttaaataacagttgagtctttgcaagtaaaaagatttagagattattatttttcagtgtgcacctactgtttgtat

SEQ ID NO: 414 - DNA, 386 bp, Homo sapiens
  misc_feature (1)..(386): 205801_s_at
gcagtcttcagtaaagcctttctcctttcttttctccattgaggacagttctgctcagcaaaattgttgagtacctgttctgggcaggtcccacgctatatgcacaaagttaagaaaaacttggtcttagcccttgggagctgacagcccatgggcattaaggcaaagtagttccagtgatttaaaatacggttccaaatacgctaaaaccaacttgtgccaaccagatttacagattggaaatactgcagatgatgtgaagttatcagttggaggagctgtgattaagctggataataagagaacgtgccatctgtaaagcactcagaaggcagccatccctagatgttggtttcatgtatattacactatctactactatccat

SEQ ID NO: 415 - DNA, 471 bp, Homo sapiens
  misc_feature (1)..(471): 205844_at
gaaaaccagagagtcccattttaagaaattagatatttaatatagcattgtgtgttctattttagtaacagcagaatctcttgacattacacaactcagtgaaacaacatcatttaagccaaaatatctcccaactgactgatagactctgagcactaatatcatagtgctgtgatgatggacaattacatagtaccgataacagccatgcactgtgcaaagcatgcccttctgcacaggagagcaaggcacttgcagtagtgatctatgccagcaaaacatcattttgagacaaacatttttgtggcagatgtttttcctaaaaagtactatatcatccaagaaatatttgagtaaaatcccttgttcttttgggtgacattaactgacatttgctttttttcaagacctaatagaaaataagaaagcccataatgtatttagaaacaggaatcctcagagcaattctct

SEQ ID NO: 416 - DNA, 503 bp, Homo sapiens
  misc_feature (1)..(503): 205898_at
agcccctgcccatctgggaaaataccccatcattcatgctactgccaacctggggagccagggctatgggagcagcttttttttcccccctagaaacgtttggaacaatgtaaaactttaaagctcgaaaacaattgtaataatgctaaagaaaaagtcatccaatctaaccacatcaatattgtcattcctgtattcacccgtccagaccttgttcacactctcacatgtttagagttgcaatcgtaatgtacagatggttttataatctgatttgttttcctcttaacgttagaccacaaatagtgctcgctttctatgtagtttggtaattatcattttagaagactctaccagactgtgtattcattgaagtcagatgtggtaactgttaaattgctgtgtatctgatagctctttggcagtctatatgtttgtataatgaatgagagaataagtcatgttccttcaagatcatgtaccccaatttacttgccattact

SEQ ID NO: 417 - DNA, 368 bp, Homo sapiens
  misc_feature (1)..(368): 205899_at
gagtctacttgaagcagatccattcttgaaatatcttccttcactgatagctgcagcagctttttgcctggcaaactatactgtgaacaagcacttttggccagaaacccttgctgcatttacagggtattcattaagtgaaattgtgccttgcctgagtgagcttcataaagcgtaccttgatataccccatcgacctcagcaagcaattagggagaagtacaaggcttcaaagtacctgtgtgtgtccctcatggagccacctgcagttcttcttctacaataagtttctgaatggaagcacttccagaacttcacctccatatcagaagtgccaataatcgtcataggcttctgcacgttggatc

SEQ ID NO: 418 - DNA, 416 bp, Homo sapiens
  misc_feature (1)..(416): 205900_at
tcaagtcctctggtggcagttccagcgtgaggtttgtttctaccacttattccggagtaaccagataaagagatgccctctgtttcattagctctagttctcccccagcatcactaacaaatatgcttggcaagaccgaggtcgatttgtcccagccttaccggagaaaagagctatggttagttacactagctcatcctattcccccagctctttcttttctgctgtttcccaatgaagttttcagatcagtggcaatctcagttcccttgctatgaccctgctttgttctttcccgagaaacagttcagcagtgaccaccacccacatgacatttcaagcaccaccttaagccagccagagtaggaccagttagacctagggtgtggacagctccttgcatcttaacactgtgc

SEQ ID NO: 419 - DNA, 542 bp, Homo sapiens
  misc_feature (1)..(542): 205919_at
gcaatcactagcaagctctcaggcctggcatcatggtgcattttactgctgaggagaaggctgccgtcactagcctgtggagcaagatgaatgtggaagaggctggaggtgaagccttgggcagactcctcgttgtttacccctggacccagagattttttgacagctttggaaacctgtcgtctccctctgccatcctgggcaaccccaaggtcaaggcccatggcaagaaggtgctgacttcctttggagatgctattaaaaacatggacaacctcaagcccgcctttgctaagctgagtgagctgcactgtgacaagctgcatgtggatcctgagaacttcaagctcctgggtaacgtgatggtgattattctggctactcactttggcaaggagttcacccctgaagtgcaggctgcctggcagaagctggtgtctgctgtcgccattgccctggcccataagtaccactgagttctcttccagtttgcaggtcttcctgtgaccctgacaccctccttctgcacatggggactgggc

SEQ ID NO: 420 - DNA, 560 bp, Homo sapiens
  misc_feature (1)..(560): 205950_s_at
gagccccattcacaaattttgacccctctactctccttccttcatccctggatttctggacctaccctggctctctgactcatcctcctctttatgagagtgtaacttggatcatctgtaaggagagcatcagtgtcagctcagagcagctggcacaattccgcagccttctatcaaatgttgaaggtgataacgctgtccccatgcagcacaacaaccgcccaacccaacctctgaagggcagaacagtgagagcttcattttgatgattctgagaagaaacttgtccttcctcaagaacacagccctgcttctgacataatccagttaaaataataatttttaagaaataaatttatttcaatattagcaagacagcatgccttcaaatcaatctgtaaaactaagaaacttaaattttagttcttactgcttaattcaaataataattagtaagctagcaaatagtaatctgtaagcataagcttatcttaaattcaagtttagtttgaggaattctttaaaattacaactaagtgatttgtatgtctatttttttc

SEQ ID NO: 421 - DNA, 195 bp, Homo sapiens
  misc_feature (1)..(195): 205992_s_at
attaacaaacatcactctgctgcttagacataacaaaacactcggcatttaaaatgtgctgtcaaaacaagtttttctgtcaagaagatgatcagaccttggatcagatgaactcttagaaatgaaggcagaaaaatgtcattgagtaatatagtgactatgaacttctctcagacttactttactcattttttt

SEQ ID NO: 422 - DNA, 540 bp, Homo sapiens
  misc_feature (1)..(540): 206057_x_at
ctgccccttaagtgtcggtgaatagtgaggctggaggccggaatctcagccagcctccagcaccttccctctcaccatcccactgccccctcgctcccatgtttccacccggcaccctgatcctcacccgaatctcctttttttttttcttttgagacagagtttcgctttgtcgcccaggctggagtgcaatgcacgatctcagttcactgcaacctctgcctcctaagttcaggcgattctcctgcctcagcttcccgagtaactgagattacaggcacccaccaccatgcccagctgcttttttgtatttttggtagagatggggtttcaccatgttggctaggctggtctcaaactcctgacctcaggtgatctacctgcctcagcctcccaaagtgctgagattacagacatgagcctccgcgccttgcctcctcacccacctcttcactctgaatcctcatgaggcttctcagccctggatttcctgctgccatcctcacccagcacccacaactagcgcctgggcagggcagg

SEQ ID NO: 423 - DNA, 441 bp, Homo sapiens
  misc_feature (1)..(441): 206067_s_at
atagatgtacatacctccttgcacaaatggaggggaattcattttcatcactgggagtgtccttagtgtataaaaaccatgctggtatatggcttcaagttgtaaaaatgaaagtgactttaaaagaaaataggggatggtccaggatctccactgataagactgtttttaagtaacttaaggacctttgggtctacaagtatatgtgaaaaaaatgagacttactgggtgaggaaatccattgtttaaagatggtcgtgtgtgtgtgtgtgtgtgtgtgtgtgttgtgttgtgttttgttttttaagggagggaatttattatttaccgttgcttgaaattactgtgtaaatatatgtctgataatgatttgctctttgacaactaaaattaggactgtataagtactagatgcatcactgggtgttgatcttacaagat

SEQ ID NO: 424 - DNA, 479 bp, Homo sapiens
  misc_feature (1)..(479): 206111_at
gtttacctgggctcaatggtttgaaacccagcacatcaatatgacctcccagcaatgcaccaatgcaatgcaggtcattaacaattatcaacggcgatgcaaaaaccaaaatactttccttcttacaacttttgctaacgtagttaatgtttgtggtaacccaaatatgacctgtcctagtaacaaaactcgcaaaaattgtcaccacagtggaagccaggtgcctttaatccactgtaacctcacaactccaagtccacagaatatttcaaactgcaggtatgcgcagacaccagcaaacatgttctatatagttgcatgtgacaacagagatcaacgacgagaccctccacagtatccggtggttccagttcacctggatagaatcatctaagctcctgtatcagcactcctcatcatcactcatctgccaagctcctcaatcatagccaagatcccatctctccatatactttggg

SEQ ID NO: 425 - DNA, 527 bp, Homo sapiens
  misc_feature (1)..(527): 206135_at
atgagctaccatatgtgctgtctattataaatgggacaccaaacaaaattttctattacagttgtgtacttgcaaacattttgctatacagtacttcatagatgcatacaaatgagctcacttattacaaagacaaacgtttaatttgctaaatattttaacaagtttgttatatattttatttaatttaaaagaaatctcttaccaacctacatatttattactataatttgctatgacttcaggttaatttatttgtgtttgcatagtttgagcaggatgttttgtgaagtatgtttgtatttatttgcctactttgtacttgatgtgttttgtaatgtgcactgaatttgttttcttttcaactatgttaatgatcaatactgtaaattgggtcttttgtaaacaaaaaggcaatgatgtatgcattttttttaatttgaggtagtttgtttgtatactgtttctccaaacacttaatatttcttacatcaaagcaacaaaattgtgttcagtgctgtacattt

SEQ ID NO: 426 - DNA, 524 bp, Homo sapiens
  misc_feature (1)..(524): 206150_at
cctgtgcagctccgattttattcgcatccttgtgatcttctctggaatgttccttgttttcaccctggccggggccctgttcctccatcaacgaaggaaatatagatcaaacaaaggagaaagtcctgtggagcctgcagagccttgtcgttacagctgccccagggaggaggagggcagcaccatccccatccaggaggattaccgaaaaccggagcctgcctgctccccctgagccagcacctgcggtagctgcactacagccctggcctccacccccaccccgccgaccatccaagggagagtgagacctggcagccacaactgcagtcccatcctcttgtcagggccctttcctgtgtacacgtgacagagtgccttttcgagactggcagggacgaggacaaatatggatgaggtggagagtgggaagcaggagcccagccagctgcgcctgcgctgcaggagggcgggggctctggttgtaaaacacacttcctgctgcgaaagacccacatgctaca

SEQ ID NO: 427 - DNA, 493 bp, Homo sapiens
  misc_feature (1)..(493): 206207_at
aggagacaacaatgtccctgctacccgtgccatacacagaggctgcctctttgtctactggttctactgtgacaatcaaagggcgaccacttgtctgtttcttgaatgaaccatatctgcaggtggatttccacactgagatgaaggaggaatcagacattgtcttccatttccaagtgtgctttggtcgtcgtgtggtcatgaacagccgtgagtatggggcctggaagcagcaggtggaatccaagaacatgccctttcaggatggccaagaatttgaactgagcatctcagtgctgccagataagtaccaggtaatggtcaatggccaatcctcttacacctttgaccatagaatcaagcctgaggctgtgaagatggtgcaagtgtggagagatatctccctgaccaaatttaatgtcagctatttaaagagataaccagacttcatgttgccaaggaatccctgtctctacgtgaacttgggattcca

SEQ ID NO: 428 - DNA, 547 bp, Homo sapiens
  misc_feature (1)..(547): 206296_x_at
ctgggcgagatgagcaccgagcacaggggacccgtgcaggtgacccaggtagaggaagatatggtgatggtgttgatggatggctctgtgaagctggtgaccccggaggggtccccagtccggggacttcgcacacctgagatccccatgaccgaagcggtggaggccgtggctatggttggaggtcagcttcaggccttctggaagcatggagtgcaggtgtgggctctaggctcggatcagctgctacaggagctgagagaccctaccctcactttccgtctgcttggctcccccaggctggagtgcagtggcacgatctcgcctcactgcaacctcctcctcccaggttcaagcaattctcctgcctcagcctcccgagtagctgggattacaggcctgtagtggtggagacacgcccagtggatgatcctactgctcccagcaacctctacatccaggaatgagtccctaggggggtgtcaggaactagtccttgcaccccctcccccatagacacactagtggtcatggcatgtcctcatct

SEQ ID NO: 429 - DNA, 535 bp, Homo sapiens
  misc_feature (1)..(535): 206310_at
ggcgcaggtaacagaccgcaggggcaagacagccggcgcgggaggaggatggcgctgtcggtgctgcgcttggcgctgctgctcctggcagtcaccttcgcagcctctctgatccctcaatttggtctgttttcaaaatatagaacgccaaactgctctcagtatagattaccaggatgtcccagacactttaaccctgtgtgtggcagtgacatgtccacttatgccaatgaatgtactctgtgcatgaaaatcagggaaggtggtcataatattaaaatcattcgaaatggaccctgctgatggagcagtttacagaaaagaagatggagagaccaccttcactggcagactagataaattgcatttcccctttttctcttttcctgtgtttctttacatgagatttgttaacacacattttctgagagcaggtatggaagacagccatgtgtagtgatggataatttaaagaaaaaaagaatccttgtttcttggcttttgctcctggagttaagcttactgcccaggtgac

SEQ ID NO: 430 - DNA, 546 bp, Homo sapiens
  misc_feature (1)..(546): 206332_s_at
atcaatcagctttgctcacaaactaaaggaagttttgtgaatggggtgtttgaggtacataagaaaaatgtaaggggtgaattcacttattatgaaatacaagataatacagggaagatggaagtggtggtgcatggacgactgaacacaatcaactgtgaggaaggagataaactgaaactcaccagctttgaattggcaccgaaaagtgggaataccggggagttgagatctgtaattcatagtcacatcaaggtcatcaagaccaggaaaaacaagaaagacatactcaatcctgattcaagtatggaaacttcaccagactttttcttctaaaatctggatgtcattgacgataatgtttatggagataaggtctaagtccctaaaaaaatgtacatatacctggttgaaatacaacactatacatacacaccaccatatatactagctgttaatcctatggaatgggggtattgggagtgcttttttaatttttcatagtttttttttaataaaatggcatattttgcatctacaacttct

SEQ ID NO: 431 - DNA, 318 bp, Homo sapiens
  misc_feature (1)..(318): 206343_s_at
agatctaatattgactgcctctgcctgtcgcatgagaacattaacaaaagcaattgtattacttcctctgttcgcgactagttggctctgagatactaataggtgtgtgaggctccggatgtttctggaattgatattgaatgatgtgatacaaattgatagtcaatatcaagcagtgaaatatgataataaaggcatttcaaagtctcacttttattgataaaataaaaatcattctactgaacagtccatcttctttatacaatgaccacatcctgaaaagggtgttgctaagctgtaaccgatatgcacttgaaa

SEQ ID NO: 432 - DNA, 423 bp, Homo sapiens
  misc_feature (1)..(423): 206366_x_at
ggacctcagccatgagacttctcatcctggccctccttggcatctgctctctcactgcatacattgtggaaggtgtagggagtgaagtctcagataagaggacctgtgtgagcctcactacccagcgactgccggttagcagaatcaagacctacaccatcacggaaggctccttgagagcagtaatttttattaccaaacgtggcctaaaagtctgtgctgatccacaagccacgtgggtgagagacgtggtcaggagcatggacaggaaatccaacaccagaaataacatgatccagaccaagccaacaggaacccagcaatcgaccaatacagctgtgaccctgactggctagtagtctctggcaccctgtccgtctccagccagccagctcatttcactttacaccctcatggactgag

SEQ ID NO: 433 - DNA, 287 bp, Homo sapiens
  misc_feature (1)..(287): 206390_x_at
gccttcgccagcgctgaagctgaagaagatggggacctgcagtgcctgtgtgtgaagaccacctcccaggtccgtcccaggcacatcaccagcctggaggtgatcaaggccggaccccactgccccactgcccaactgatagccacgctgaagaatggaaggaaaatttgcttggacctgcaagccccgctgtacaagaaaataattaagaaacttttggagagttagctactagctgcctacgtgtgtgcatttgctatatagcatacttcttttttccagtttca

SEQ ID NO: 434 - DNA, 538 bp, Homo sapiens
  misc_feature (1)..(538): 206438_x_at
cctcagcctccggagaactgggattacaggcatgcaccaccacacccggctaattttgtatttttagtagagacagggttccaccgtattggccaggctgctctcgaactcctgacctcatgatccgcccatcttggcctcccaaagtgctgagattacaggcatgagccaccgcacccggcctttttttttttttttttttttgaggcggggtctcactctgacacccaggctggagtgcagtgcacaatctcggctcactgcaatctctgcctcccaagcaatcctcccacctcagcctctggtgtagctgggaccacagatgctccaccatgcctggctgtatttttggtaaagatggggtttcgccttgttgcccagggtggtctgtaactcctgagctcagatgatctgcccacctcggcctcccaaagtgctgggatcacagacgtgagccactgcgtccggtccatctgacttctcaaagactttagaccttgacttcagtgatttgttgtagtcttgtatgcttctctat

SEQ ID NO: 435 - DNA, 244 bp, Homo sapiens
  misc_feature (1)..(244): 206461_x_at
gccggctcctgcaagtgcaaaaagtgcaaatgcacctcctgcaagaagagctgctgctcctgttgccccctgggctgtgccaagtgtgcccagggctgcatctgcaaaggggcgtcagagaagtgcagctgctgtgcctgatgtcgggacagccctgctgtcagatgaaaacagaatgacacgtaaaatccgaggttttttttttctacaactccgactcatttgctacattcctttttttctg

SEQ ID NO: 436 - DNA, 516 bp, Homo sapiens
  misc_feature (1)..(516): 206478_at
caagccatggcaatatctgtcccaccgaatgctccctctaacacactcttactcccgtgatgtgtgttaagggctccgatgatgctgaaaacagcacaggatgtgaaaaggcaggaacagttctgaagtcaaaggctgatgtcctgtttctctttccctctgtgaccgactcccttcccagtggtaacaagtacccacagcttggtttgaatttctgcacgctgttgtctgtgcactcgctcacacttacgcacacagcaggcatgtgggcgatgctgggtattttgtgtatgagtgggatgcacatacacacatctacatccatatcatgcccatgcatctgtaacttgcttttcccgtgtaagaacacttcttagagtttgttcaatgcatgtgtctgtgtgaatgattgaaggcatttctaacccattttaaagatggctacttaggaccatatggatgttgtactgatgtcatttgaccacgtccattgtttccatcttttgggctgttctt

SEQ ID NO: 437 - DNA, 526 bp, Homo sapiens
  misc_feature (1)..(526): 206622_at
gccctcttcctttaggcatgtgagaaaatcagcctagcagtttaaaccccactttcctccacttagcaccataggcaagggggcagatcccagagcccctctcaccccccccaccacaggcctgctccttccttagccttggctaagatggtccttctgtgtcttgcaaagactccccaagtggacagggagcccctgggagggcagccagtgagggtggggtgggactgaagcgttgtgtgcaaatccagcttccatcccctccccaacctggcaggattctccatgtgtaaacttcacccccaggacccaggatcttctcctttctgggcatccctttgtgggtgggcagagccctgacccacagctgtgttactgcttggagaagcatatgtaggggcataccctgtggtgttgtgctgtgtctggctgtgggataaatgtgtgtgggaatattgaaacatcgcctaggaattgtggtttgtatataaccctctaagcccctatcccttgtcgatgacagtca

SEQ ID NO: 438 - DNA, 265 bp, Homo sapiens
  misc_feature (1)..(265): 206655_s_at
ccggaaccgacgagtcctgaggagagaaccggtgcgtcctgaggagagaaccggcgctgggcaacacgggcctgcaaactcgacaggaccctgcccgaggggccctcgcgccaacctggaccggtccccgcctcctccgctgcccaatctctcagacccaccccacctgcaggcccagaccacgtgggacagaactcctgcccaccctaccccgagggaggcgaacccgcacttccaggcttgggaggaccatggggcacaatgc

SEQ ID NO: 439 - DNA, 158 bp, Homo sapiens
  misc_feature (1)..(158): 206665_s_at
ggatacttttgtggaactctatgggaacaatgcagcagccgagagccgaaagggccaggaacgcttcaaccgctggttcctgacgggcatgactgtggccggcgtggttctgctgggctcactcttcagtcggaaatgaccagacactgaccatccac

SEQ ID NO: 440 - DNA, 389 bp, Homo sapiens
  misc_feature (1)..(389): 206674_at
gatggccgtgtttcggaatgtcctcacacctaccaaaacaggcgacctttcagcagagagatggatttggggctactctctccgcaggctcaggtcgaagattcgtagaggaacaatttagttttaaggacttcatccctccacctatccctaacaggctgtagattaccaaaacaagattaatttcatcactaaaagaaaatctattatcaactgctgcttcaccagacttttctctagaagccgtctgcgtttactcttgttttcaaagggacttttgtaaaatcaaatcatcctgtcacaaggcaggaggagctgataatgaactttattggagcattgatctgcatccaaggccttctcaggccggcttgagtgaattgtgtacc

SEQ ID NO: 441 - DNA, 549 bp, Homo sapiens
  misc_feature (1)..(549): 206726_at
cttactcttcaccagagcctagcaatagcaagatatttgaccaaaaacacagatttggctggaaacacagaaatggaacaatgtcatgttgatgctattgtggacactctggatgatttcatgtcatgttttccttgggcagagaaaaagcaagatgtgaaagagcagatgttcaatgagctgctcacgtataatgcgcctcatcttatgcaagacttggacacatatttaggggggagagaatggcttattggtaactctgtaacttgggcagacttctactgggagatttgcagtaccacacttttggtctttaagcctgacctgttagacaaccatccaaggctggtgactttacggaagaaagtccaagccattcctgccgtcgctaactggataaaacgaaggccccaaaccaaactctagctgatccatgttgccttcaagtttgtttttctcgggggcatctctctcatcagataagacagctacatcagcctgccagataatccacatgctccctccccagctccactaagattttcactt

SEQ ID NO: 442 - DNA, 524 bp, Homo sapiens
  misc_feature (1)..(524): 206834_at
ggagaagactgctgtcaatgccctgtggggcaaagtgaacgtggatgcagttggtggtgaggccctgggcagattactggtggtctacccttggacccagaggttctttgagtcctttggggatctgtcctctcctgatgctgttatgggcaaccctaaggtgaaggctcatggcaagaaggtgctaggtgcctttagtgatggcctggctcacctggacaacctcaagggcactttttctcagctgagtgagctgcactgtgacaagctgcacgtggatcctgagaacttcaggctcttgggcaatgtgctggtgtgtgtgctggcccgcaactttggcaaggaattcaccccacaaatgcaggctgcctatcagaaggtggtggctggtgtggctaatgccctggctcacaagtaccattgagatcctggactgtttcctgataaccataagaagaccctatttccctagattctattttctgaacttgggaacacaatgcctacttcaagggtatggcttc

SEQ ID NO: 443 - DNA, 503 bp, Homo sapiens
  misc_feature (1)..(503): 206851_at
cagacccccacagtttacgagggctcagtggtttgccatccagcacatcagtctgaacccccctcgatgcaccattgcaatgcgggcaattaacaattatcgatggcgttgcaaaaaccaaaatacttttcttcgtacaacttttgctaatgtagttaatgtttgtggtaaccaaagtatacgctgccctcataacagaactctcaacaattgtcatcggagtagattccgggtgcctttactccactgtgacctcataaatccaggtgcacagaatatttcaaactgcaggtatgcagacagaccaggaaggaggttctatgtagttgcatgtgacaacagagatccacgggattctccacggtatcctgtggttccagttcacctggataccaccatctaagctcctgtatcagcagtcctcatcatcactcatctgccaagctcctcaatcatagccaagatcccatccctccatgtactctgggtatcagcaactgtcc

SEQ ID NO: 444 - DNA, 437 bp, Homo sapiens
  misc_feature (1)..(437): 206871_at
gtgcagcgcatcttcgaaaacggctacgaccccgtaaacttgctcaacgacatcgtgattctccagctcaacgggtcggccaccatcaacgccaacgtgcaggtggcccagctgccggctcagggacgccgcctgggcaacggggtgcagtgcctggccatgggctggggccttctgggcaggaaccgtgggatcgccagcgtcctgcaggagctcaacgtgacggtggtgacgtccctctgccgtcgcagcaacgtctgcactctcgtgaggggccggcaggccggcgtctgtttcggggactccggcagccccttggtctgcaacgggctaatccacggaattgcctccttcgtccggggaggctgcgcctcagggctctaccccgatgcctttgccccggtggcacagtttgtaaactggatcgactctatcat

SEQ ID NO: 445 - DNA, 348 bp, Homo sapiens
  misc_feature (1)..(348): 207000_s_at
ggcgtcctctcaggaggcaagcagactatcgagacagccatcagagggttctcgcttcagcacaagatccggagttttgaagaagcgcgaggtctggaccgaattaatgagcgaatgccaccccgaaaggatagcatataccctggtgggccaatgaaatctgtaacctcagcacactcacatgctgcgcacaggagcgaccaagggaagaaagcccattcatgacttagagtcctgccgtgctcaggtggatctaaaactcaagaacaaattctatttatttattattggaaaatgaaaagcaactcaaaacaacttcaacctggaggtgcatttataattcagtct

SEQ ID NO: 446 - DNA, 495 bp, Homo sapiens
  misc_feature (1)..(495): 207072_at
tcagttcctcccaattctaggttctgggccaaaatgcgctaccacatgcctgtgaaaaactctcagggattcacgtggaaccagctcagaattacctctaggatttttcagtggaaaggactcagtagaacagaaaccactgggaggagctcccagcctaaggaatggtgaaatgagccctggagccccctccagtccagtccctgggatagagatgttgctggacagaactcacagctctgtgtgtgtgtgttcaggctgataggaaattcaaagagtctcctgccagcaccaagcaagcttgatggacaatggaatgggattgagactgtggtttagagcctttgatttcctggactggacagacggcgagtgaattctctagaccttgggtactttcagtacacaacacccctaagatttcccagtggtccgagcagaatcagaaaatacagctacttctgccttatggctagggaactgtcatgtctacca

SEQ ID NO: 447 - DNA, 536 bp, Homo sapiens
  misc_feature (1)..(536): 207134_x_at
tgacgcaaaataccaccttggcgcctacacgggagacgacgtccgcatcgtccgtgacgacatgctgtgtgccgggaacacccggagggactcatgccagggcgactccggagggcccctggtgtgcaaggtgaatggcacctggctgcaggcgggcgtggtcagctggggcgagggctgtgcccagcccaaccggcctggcatctacacccgtgtcacctactacttggactggatccaccactatgtccccaaaaagccgtgagtcaggcctgggttggccacctgggtcactggaggaccaacccctgctgtccaaaacaccactgcttcctacccaggtggcgactgccccccacaccttccctgccccgtcctgagtgccccttcctgtcctaagccccctgctctcttctgagccccttcccctgtcctgaggacccttccccatcctgagcccccttccctgtcctaagcctgacgcctgcaccgggccctccggccctcccctgcccaggcagctggtggtgggcgct

SEQ ID NO: 448 - DNA, 382 bp, Homo sapiens
  misc_feature (1)..(382): 207269_at
cagccatgaggattatcgccctcctcgctgctattctcttggtagccctccaggtccgggcaggcccactccaggcaagaggtgatgaggctccaggccaggagcagcgtgggccagaagaccaggacatatctatttcctttgcatgggataaaagctctgctcttcaggtttcaggctcaacaaggggcatggtctgctcttgcagattagtattctgccggcgaacagaacttcgtgttgggaactgcctcattggtggtgtgagtttcacatactgctgcacgcgtgtcgattaacgttctgctgtccaagagaatgtcatgctgggaacgccatcatcggtggtgttagcttcacatgcttctgcagctgagcttgc

SEQ ID NO: 449 - DNA, 487 bp, Homo sapiens
  misc_feature (1)..(487): 207339_s_at
gcaggggctaggctgggagacgacgaaggaacaggcgtttctgacgagcgggacgcagttctcggacgccgaggggctggcgctcccgcaggacggcctctattacctctactgtctcgtcggctaccggggccgggcgccccctggcggcggggacccccagggccgctcggtcacgctgcgcagctctctgtaccgggcggggggcgcctacgggccgggcactcccgagctgctgctcgagggcgccgagacggtgactccagtgctggacccggccaggagacaagggtacgggcctctctggtacacgagcgtggggttcggcggcctggtgcagctccggaggggcgagagggtgtacgtcaacatcagtcaccccgatatggtggacttcgcgagagggaagaccttctttggggccgtgatggtggggtgagggaatatgagtgcgtggtgcgagtgcgtgaatattgggggcccggac

SEQ ID NO: 450 - DNA, 421 bp, Homo sapiens
  misc_feature (1)..(421): 207341_at
gcccacaacgtgcggacgcaggagcccacccagcagcacttctcggtggctcaggtgtttctgaacaactacgacgcggagaacaaactgaacgacattctcctcatccagctgagcagcccagccaacctcagtgcgtccgtcacctcagtccagctgccacagcaggaccagccagtgccccacggcacccagtgcctggccatgggctggggccgcgtgggtgcccacgaccccccagcccaggtcctgcaggagctcaatgtcaccgtggtgaccttcttctgccggccacataacatttgcactttcgtccctcgccgcaaggccggcatctgcttcggagactcaggtggccccctgatctgtgatggcatcatccaaggaatagactccttcgtgatctggggatgtgccaccc

SEQ ID NO: 451 - DNA, 405 bp, Homo sapiens
  misc_feature (1)..(405): 207459_x_at
aggaaccagctcatgatctcaggatgtatggaaaaataatctttgtattactattgtcagaaattgtgagcatatcagcattaagtaccactgaggtggcaatgcacacttcaacctcttcttcagtcacaaagagttacatctcatcacagacaaatggagaaacgggacaacttgtccatcgtttcactgtaccagctcctgtagtgataatactcattattttgtgtgtgatggctggtattattggaacgatcctcttaatttcttacactattcgccgactgataaaggcatgaggatgtggcctgcatgctgcctgtattgcctgcatgctgcctgatcttgcgataaccggctgcacctgctgttctcttctttatgcaaactggctgcacctgctat

SEQ ID NO: 452 - DNA, 415 bp, Homo sapiens
  misc_feature (1)..(415): 207460_at
gacgggaaagtgaagcccagccggaccatccggccgttggccctgcccagtaagcgccaggtggtggcagcagggactcggtgcagcatggccggctgggggctgacccaccagggcgggcgcctgtcccgggtgctgcgggagctggacctccaagtgctggacacccgcatgtgtaacaacagccgcttctggaacggcagcctctcccccagcatggtctgcctggcggccgactccaaggaccaggctccctgcaagggtgactcgggcgggcccctggtgtgtggcaaaggccgggtgttggccggagtcctgtccttcagctccagggtctgcactgacatcttcaagcctcccgtggccaccgctgtggcgccttacgtgtcctggatcaggaaggtcaccggccgat

SEQ ID NO: 453 - DNA, 560 bp, Homo sapiens
  misc_feature (1)..(560): 207614_s_at
ctgtgcagcagctgaccgacagcactcaaattaaaatggacattttggcgcaagttttacagattttattaaagtcgaagctattggtcttggaagatgaaaatgcaaatgttgatgaggtggaattgaagccagataccttaataaaattatatcttggttataaaaataagaaattaagggttaacatcaatgtgccaatgaaaaccgaacagaagcaggaacaagaaaccacacacaaaaacatcgaggaagaccgcaaactactgattcaggcggccatcgtgagaatcatgaagatgaggaaggttctgaaacaccagcagttacttggcgaggtcctcactcagctgtcctccaggttcaaacctcgagtccctgtgatcaagaaatgcattgacattctaattgagaaagaatatttggagcgagtggatggtgaaaaggacacctacagttacttggcttaacccttctggaagggtctgactgtgtgacccgcagcaaatagttcatgttggaaagaatgaaaacaacttcaagttcataggcagccagcc

SEQ ID NO: 454 - DNA, 463 bp, Homo sapiens
  misc_feature (1)..(463): 207697_x_at
ttccaacatcctgcaggggctgtggggccagagcccacagacagaggcctgcagtggaggtccagcccagctgccgacgcccaggaagaaaacctctatgctgccgtgaaggacacacagcctgaagatggggtggagatggacactcgggctgctgcatctgaagccccccaggatgtgacctacgcccagctgcacagcttgaccctcagacggaaggcaactgagcctcctccatcccaggaaagggaacctccagctgagcccagcatctacgccaccctggccatccactagcccggagggtacgcagactccacactcagtagaaggagactcaggactgctgaaggcacgggagctgcccccagtggacaccaatgaaccccagtcagcctggacccctaacaaagaccatgaggagatgctgggaactttgggactcacttgattctgcagtcga

SEQ ID NO: 455 - DNA, 524 bp, Homo sapiens
  misc_feature (1)..(524): 207719_x_at
gtaactctatacacttcaagactttacaggattttttaaatcctgtattgttggatcaattaataaagatgcaaaaaaactttatagagatgtaaaaacaaaactataatggatctcctatttttctttaaatacaaaaaaaaaaaggtaaatgaactattctccttgtaaagctaaattccccattctgtctaataaaggaagactgaaaaaaggttttaaagaacataaatggaaagatacaaatgctttgaaggaataaacgaaatgttaaaacagggtcaatccatttgaagaaaaagttggacaaaataatcagcattgctccctcttttatttaatatttgggtactgattatatccacatggaagtagaaggtaaggagtttaggaaaatactagaatctactctgcttacattcttgtttaagtgtttacacagtttggttcaattataaacatttggccttttactatgttatttttattttgtatgaatacattatcctccttatttatttttg

SEQ ID NO: 456 - DNA, 304 bp, Homo sapiens
  misc_feature (1)..(304): 207741_x_at
tgacgcaaaataccaccttggcgcctacacgggagacgacgtccgcatcatccgtgacgacatgctgtgtgccgggaacagccagagggactcctgcaagggcgactctggagggcccctggtgtgcaaggtgaatggcacctggctacaggcgggcgtggtcagctgggacgagggctgtgcccagcccaaccggcctggcatctacacccgtgtcacctactacttggactggatccaccactatgtccccaaaaagccgtgagtcaggcctgggtgtgccacctgggtcactggaggacca

SEQ ID NO: 457 - DNA, 474 bp, Homo sapiens
  misc_feature (1)..(474): 207761_s_at
ttattcttagcgtcactggtctggctttcagaattaacatacaaggttgccacacctagttctgcccagctttatgtcttttattccagtattccaccaaagtttgttttcctgcattccagttctcaagtcttaagataaagattgtacttgacagtttagtatatccataaaactatttgaggtggttaaggttcttgggttcattttccttaatactttgctgaatattgtagattgtaggcaatgaaaaagtctactaaattaggaaaaccttgaataattaggtatcctaggtaagagcccctaaacatcaagcaatctgtgagtctgtaaagaaataaatattttttggattattcttatctaattccacccctgttggaagatgatttctttgttctttgcaactatggaagctgtgaaaatcatcacaagtgcctctgaaagcgagtgttaggttggttagagggt

SEQ ID NO: 458 - DNA, 417 bp, Homo sapiens
  misc_feature (1)..(417): 207826_s_at
gaacttgtcatctccaacgacaaaaggagcttttgccactgactcggccgtgtcctgacacctccagaacgcaggtgctggcgcccgttctgcctgggaccccgggaacctctcctgccggaagccggacggcagggatgggccccaacttcgccctgcccacttgacttcaccaaatcccttcctggagactgaacctggtgctcaggagcgaaggactgtgaacttgtggcctgaagagccagagctagctctggccaccagctgggcgacgtcaccctgctcccaccccaccccaagttctaaggtcttttcagagcgtggaggtgtggaaggagtggctgctctccaaactatgccaaggcggcggcagagctggtcttctggtctccttggagaaaggttctgttgccctga

SEQ ID NO: 459 - DNA, 493 bp, Homo sapiens
  misc_feature (1)..(493): 207943_x_at
gtgagttatcacttcatttatcttaaagaaagactaaactggttgtcagttacatctgacagaaaaaaaaaaaaaaatcactgtgtaaccagggttaagtggttaaaataatccagggcgtcagtcaaaggcattttgctgactttaatattgattatatttttaacagggaatttaaggaaaatattaccggggaattaaaaaatatatatatattaaaacaagaattttcctttgcccctgtccagcctaaacctacctacctcaaggctgcctaagttcctaagtattgtttgtaatcacccaataaataagtgcatttgtaattcatcagtcattattagcttttattaaaagaagattacgttttacaatgtaactataatctcttgaatttggtatcttattaatgagttttaaagatgtaaaacctaaccttttttaaagctccattgtcttatgtttttagaggcttttccgtaaacatatatct

SEQ ID NO: 460 - DNA, 455 bp, Homo sapiens
  misc_feature (1)..(455): 208146_s_at
gaaatttttgtcactcccagaggtgagacaagccatccacgtggggaatcagacttttaatgatggaactatagttgaaaagtacttgcgagaagatacagtacagtcagttaagccatggttaactgaaatcatgaataattataaggttctgatctacaatggccaactggacatcatcgtggcagctgccctgacagagcactccttgatgggcatggactggaaaggatcccaggaatacaagaaggcagaaaaaaaagtttggaagatccttaaatctgacagtgaagtggctggttacatccggcaagcgggtgactcccatcaggtaattattcgaggtggaggacatattttaccctatgaccagcctctgagagcttttgacatgattaatcgattcatttatggaaaaggatgggatccttatgttggataaactaccttcccga

SEQ ID NO: 461 - DNA, 392 bp, Homo sapiens
  misc_feature (1)..(392): 208450_at
ggagctgtcaccatgacgggggaacttgaggttaagaacatggacatgaagccggggtcaaccctgaagatcacaggcagcatcgccgatggcactgatggctttgtaattaatctgggccaggggacagacaagctgaacctgcatttcaaccctcgcttcagcgaatccaccattgtctgcaactcattggacggcagcaactgggggcaagaacaacgggaagatcacctgtgcttcagcccagggtcagaggtcaagttcacagtgacctttgagagtgacaaattcaaggtgaagctgccagatgggcacgagctgacttttcccaacaggctgggtcacagccacctgagctacctgagcgtaaggggcgggttcaacatgtcctc

SEQ ID NO: 462 - DNA, 443 bp, Homo sapiens
  misc_feature (1)..(443): 208622_s_at
  misc_feature (192)..(192): n is a, c, g, or t
  misc_feature (193)..(193): n is a, c, g, or t
agaggacccacaatgacatcatccacaacgagaacatgaggcaaggccgggacaagtacaagacgctgcggcagatccggcagggcaacaccaagcagcgcatcgacgagttcgaggccctgtaacagccaggccaggaccaagggcagaggggtgctcatagcgggcgctgccagccccgccacgcttgtnnctttagtgctccaagtctaggaactccctcagatcccagttcctttagaaagcagttacccaacagaaacattctgggctgggaaccagggaggcgccctggtttgttttccccagttgtaatagtgccaagcaggcctgattctcgcgattattctcgaatcacctcctgtgttgtgctgggagcaggactgattgaattacggaaaatgcctgtaaagtctgagtaagaaacttcatgctggcctgtg

SEQ ID NO: 463 - DNA, 524 bp, Homo sapiens
  misc_feature (1)..(524): 208626_s_at
caaaaacaggtgccctcatcgtggtctgtgccatgtcccgtctctatggtggttgaggagaaaggcggggaagcttcctcagccttgcagatatgtgtggcatttactagccagagctctgaaaggcagtgctgtctgtttcttgtactgggaccaaagtaaaaatccaagcacattccccttgcagttaggggaggccctactgccttctcaaagcagagaggcagcttatcaaactcagcccaaaactctgtttacatgggtggggagatggagcagggaagtacagagtgggatggtcaggacctgggccattgcaaccaaaatggggacttcctgggtagggaggtcactccctctactcactgagctaggattagggagggttattgccccaaccattgcaatgggaggtggagggacaggctcagcctcctcattgtctaaatgaggcctaaatgtgtgaagtgcgatttctgcttttgtgtaccccaccaccccattaccacagctgcctttgtgtg

SEQ ID NO: 464 - DNA, 388 bp, Homo sapiens
  misc_feature (1)..(388): 208651_x_at
ctgggattacaggcttgagcccccgcgcccagccatcaaaatgctttttatttctgcatatgtttgaatactttttacaatttaaaaaaatgatctgttttgaaggcaaaattgcaaatcttgaaattaagaaggcaaaatgtaaaggagtcaaactataaatcaagtatttgggaagtgaagactggaagctaatttgcataaattcacaaacttttatactctttctgtatatacattttttttctttaaaaaacaactatggatcagaatagccacatttagaacactttttgttatcagtcaatatttttagatagttagaacctggtcctaagcctaaaagtgggcttgattctgcagtaaatcttttacaactgcctcgaca

SEQ ID NO: 465 - DNA, 277 bp, Homo sapiens
  misc_feature (1)..(277): 208657_s_at
aagaggggcctgatgagactccactcaggtgcacacatcaccaggtgcatctgcaggcaccgggctggctgcttgcagccaggagaaggtcagcgagaaggagtgtatgagtgtgagtgtgtgtgcatggaagttggggcactgggcgtctgactccctccccacccaagagaggaaggacccctcaccacccccactggcgagacagtttactttgccgacttgccatgtttttgccaaaaccaagattttgaaggaaatgagtggccagcgccag

SEQ ID NO: 466 - DNA, 506 bp, Homo sapiens
  misc_feature (1)..(506): 208677_s_at
  misc_feature (198)..(198): n is a, c, g, or t
  misc_feature (201)..(201): n is a, c, g, or t
  misc_feature (429)..(429): n is a, c, g, or t
  misc_feature (439)..(439): n is a, c, g, or t
gactgggcctggtacaagatcactgactctgaggacaaggccctcatgaacggctccgagagcaggttcttcgtgagttcctcgcagggccggtcagagctacacattgagaacctgaacatggaggccgaccccggccagtaccggtgcaacggcaccagctccaagggctccgaccaggccatcatcacgctccgncgntgcgcagccacctggccgccctctggcccttcctgggcatcgtggctgaggtgctggtgctggtcaccatcatcttcatctacgagaagcgccggaagcccgaggacgtcctggatgatgacgacgccggctctgcacccctgaagagcagcgggcagcaccagaatgacaaaggcaagaacgtccgccagaggaactcttcctgaggcaggtggcccgaggacgctnccctgctccngcgtctgcgccgccgccggagtccactcccagtgcttgcaagattccaagttctcacctcttaaaga

SEQ ID NO: 467 - DNA, 565 bp, Homo sapiens
  misc_feature (1)..(565): 208690_s_at
aatgctcagaagttgcctatgtgtgacaaatgtggcactgggattgttggtgtgtttgtgaagctgcgggaccgtcaccgccaccctgagtgttatgtgtgcactgactgtggcaccaacctgaaacagaagggccatttctttgtggaggatcaaatctactgtgagaagcatgcccgggagcgagtcacaccacctgagggttatgaagtggtcactgtgttccccaagtgagccagcagatctgaccactgttctccagcaggcctctgctgcagctttttctctcagtgttctggccctctcctctcttgaaagttctctgcttactttggttttccctctgcttgtaaaacattgagtcccctccctgccttggttaattgactcacaccagctgtgcgatgcccgcttttacaattaaaggaaaactgttttgttcagtgtcaccttgtcagcaacactgtgtcccttcgccccaccgttcttctctgctgcatttggacatcagccaaatttgaacccaatcaaatataacgtgtctgacactgattttgtttttact

SEQ ID NO: 468 - DNA, 449 bp, Homo sapiens
  misc_feature (1)..(449): 208713_at
  misc_feature (177)..(177): n is a, c, g, or t
ggggtggggctgttgatatttcatcaagataaggcatttctttcctggagttcaggtgactgagggaagagccaccaaaacaaaacacaaccaaaacccaaaccaccagaattcatctttttaaccccaactttttattaccggatggcccccagtttccccattaacttttggcancacaagcttctgtgttcagttgaattgtaactgctttttgtatttggagagagtgactattgaacttgaaaccttttattccgggcgtcttggtagtttctggtgggattcagtgggtgagagggaagaaggggaggttggggggctccttcccttcagaacttgaagtttctcccactgcctcctctccagtggtctcccaggtgccagacccaaaagcttttcctacagtgataccctttatttttacttccccttgactcatatgtttt

SEQ ID NO: 469 - DNA, 531 bp, Homo sapiens
  misc_feature (1)..(531): 208767_s_at
  misc_feature (349)..(349): n is a, c, g, or t
  misc_feature (403)..(403): n is a, c, g, or t
gggttacttgattagctgtgtttggaactgctaccgatacatcaatggtaggaactcctctgatgtcctggtttatgttaccagcaatgacactacggtgctgctacccccgtatgatgatgccactgtgaatggtgctgccaaggagccaccgccaccttacgtgtctgcctaagccttcaagtgggcggagctgagggcagcagcttgactttgcagacatctgagcaatagttctgttatttcacttttgccatgagcctctctgagcttgtttgttgctgaaatgctactttttaaaatttagatgttagattgaaaactgtagttttcaacatatgctttgctngaacactgtgatagattaactgtagaattcttcctgtacgattggggatataangggcttcactaaccttccctaggcattgaaacttcccccaaatctgatggacctagaagtctgcttttgtacctgctgggccccaaagttgggcatttttctctctgttccctctcttttgaaaatgt

SEQ ID NO: 470 - DNA, 524 bp, Homo sapiens
  misc_feature (1)..(524): 208789_at
  misc_feature (314)..(314): n is a, c, g, or t
  misc_feature (315)..(315): n is a, c, g, or t
  misc_feature (316)..(316): n is a, c, g, or t
  misc_feature (317)..(317): n is a, c, g, or t
  misc_feature (318)..(318): n is a, c, g, or t
  misc_feature (319)..(319): n is a, c, g, or t
  misc_feature (320)..(320): n is a, c, g, or t
gaagggagtgttgctcccagtccagaggcctgattctgttcggactgggttctcaagacacgaccaggttctcaagacacgagtccccttgttcctccccattaaagggggtttgtcagaagcaagaacagcccctctccccagtcacagcctgaagggaggccccgagagcttcctccttccccccacctgctccttaccttctctgccctgctttttagaactgcagttcattgttttaagggattgggggagggagcctggggacacaaaccttttatacaatacaaagctttgctttttttttttttttnnnnnnnccttttccctttctcggttctcttctctcctctgaatggctgaagacccctctgccgagggaggttggggattgtgggacaaggtcccttggtgctgatggcctgaaggggcctgagctgtgggcagatgcagttttctgtgggcttggggaacctctcacgttgctgtgtcctggtgagcagcccgaccaataaacctgcttt

SEQ ID NO: 471 - DNA, 348 bp, Homo sapiens
  misc_feature (1)..(348): 208817_at
cggatggtggatttcgctggcatgaaggacaaggtcacccttgtggttggagcgtcccaggacatcatcccccagctgaagaagaagtatgatgtggacacactggacatggtcttcctcgaccactggaaggaccggtacctgccggacacgcttctcttggaggaatgtggcctgctgcggaaggggacagtgctactggctgacaacgtgatctgcccaggtgcgccagacttcctagcacacgtgcgcgggagcagctgctttgagtgcacacactaccaatcgttcctggaatacagggaggtggtggacggcctggagaaggccatctacaagggcccaggc

SEQ ID NO: 472 - DNA, 403 bp, Homo sapiens
  misc_feature (1)..(403): 208857_s_at
agcaacatcagcttgaccagtataaaattacagtggattgctcatctcagtcctcaaagctttttgaaaaccaacaccatcacagcttgttttggactttgttacactgttattttcagcatgaaaatgtgtgtttttttagggtttctgattcttcaaagaggcacagagccaaattggtagaggaaggatgcaaagtataaatttgtgtaatattactttaacatgcccatattttacttggaaatattaaaagaaagggttctgtaaaatggaaaacttagtttgtgaattgattttgaggagtggtttttcttttcttggacacttaattctgttctgatattaatttatcagattgcttttgtgcattggataacaccaccattcacaagttaagatt

SEQ ID NO: 473 - DNA, 485 bp, Homo sapiens
  misc_feature (1)..(485): 208858_s_at
ttctgtatctgtgcctggccagtggcagcactagcagtggtattagcttatgccaaatacagctttggaaggatctttttttctttaactagatggtcaccttcttccctaccacacatgggtgggaaggtggacaggctaacctctccagctgtgagcctcttagactactgcatgtagcaaatgttcagcagctcaggcccccatgtccagttctgtccccactgtcctcaaccctgtcctgaaaattctactgctttgatggctggggccagtctcttgtcactttggaaactgaggacgcgtggattctactcaagcctccaagtagtggcatatcagtcttggagctcctagctggtgatacggagagggctttggaggacttgggacagcagggccaatttttttgcccaagtgcctaggctgctaactcactgactagaacttaatctggtactttacagttttgcaccaactctgcc

SEQ ID NO: 474 - DNA, 536 bp, Homo sapiens
  misc_feature (1)..(536): 208870_x_at
ccccccacttttggagatgcgtcagtcattgcccttgaattactaaattctggatatgaatttgatgaaggctccatcatctttaataaattcaggtctgtcatctcctataagacagaagaaaagcccatcttttcccttaataccgttgcaagtgctgacagcatgagtatctatgacgatattgatgctgacgtgctgcaaaattaccaagaatacaatctggccaacatcatctactactctctgaaggagtccaccactagtgagcagagtgccaggatgacagccatggacaatgccagcaagaatgcttctgagatgattgacaaattgacattgacattcaaccgtacccgccaagctgtcatcacaaaagagttgattgaaattatctctggtgctgcagctctggattaatgaaaatcaagttccatcctcagacaagaggtaaagaaggaaaattcagccagttgattttgtttttagcttactgctgcctttgtccgaagaaaccgttcctccattatttgaat

SEQ ID NO: 475 - DNA, 514 bp, Homo sapiens
  misc_feature (1)..(514): 208881_x_at
gatacttacagtcagccactgcttttgataagtgatattgattaggttgaatcttcttgtaaatagtatttaccagttagcaaagtctgtgttttcagaattacagtgagcacagaggtgttcataaaatgggaattgagtcccactcggtaagagttgcttaaacttgacactgttgacatttgggctggataaaacccctgtggtggggtctgtgctgtgcattgcaggatggtgagcagcgtccctctcatgtgacacccacagttatgccggatgttgccagatgcccctaggggacagagtcaacccccaactgaggaccactgtcctacagagtcaggaaatattgtagggagaaaaaaataacaacaacaaaggcctgtgttaatgttaaatagatgagattatggaatgtgtatattaatgttaaaaattgtaccttgatcaatgtactttttataaacttgccatagatatctcagatttgaaacctcaagacagatttattatt

SEQ ID NO: 476 - DNA, 502 bp, Homo sapiens
  misc_feature (1)..(502): 208886_at
agggtggggagtcagccaagtgcctcagtgtgccctgttgaaacttaggtttttccacgcaatcgatggattgtgtcctaggaagacttttcttttcctctggatttttgttcctcctgtacaagaggtgtctttgcttggtttggtggggctgcggccacttaaaacctcccgatctctttttgagtcctttattataagtagttgtagctgcgggagggggagggggagtgggcgggcagtggatagtaagacttactgcagtcgatttgggatttgctaagtagttttacagagctagatctgtgtgcatgtgtgtgtttgtgtatatatacatatctagggctagtacttagtttcacacccgggagctgggagaaaaaacctgtacagttgtctttctcttatttttaataaaaaaaaaaatcagcgcacttgcgcgtcccccccccacccccttttttaaacaagtgttacttgtgccgggaaaattttgctgtct

SEQ ID NO: 477 - DNA, 318 bp, Homo sapiens
  misc_feature (1)..(318): 208898_at
gagatctgtaaaacctgcccaggaacttacagaatttactttgcagaagcgttatcatactccatttacatctgtgttacacgtgatctgcttaccaagcatattaggaaatacctcttaggaagcattagcggtctcaggccaattactgtggagcagctttcattcctacccacttgcaaaccttggcgctgttgtctgagattgctgcagccattcttgttaccatggtacttctcaaactttgtgaaaacctgcacttttccttgcatgacaggttcctgtcttgtctgtcatgggagccattctgccaattta

SEQ ID NO: 478 - DNA, 561 bp, Homo sapiens
  misc_feature (1)..(561): 208899_x_at
ggtgacttcagcactacagttatccaaaatgtcaataaagcgcaagtgaagattcgagcgaagaaagataatgtagcaggtgttactttgccagtatttgaacattaccatgaaggaactgacagttatgaactgactggtttagccagaggtggggaacagttggctaaattaaagaggaattatgccaaagcagtggaactactggtggaactagcttctctgcagacttcttttgttactttggatgaagctattaagataaccaacaggcgtgtaaatgccattgaacatgtcatcattccccggattgaacgtactcttgcttatatcatcacagagctggatgagagagagcgagaagagttctataggttaaagaaaatacaagagaagaaaaagattctaaaggaaaaatctgagaaggacttggagcaaaggagagcagctggaaggtgttggagcctgctaatcttcttggctgaagagaaggacgaggatcttctatttgaataatctttcctgttctggttctttgagaaaccctaacactggcttcat

SEQ ID NO: 479 - DNA, 541 bp, Homo sapiens
  misc_feature (1)..(541): 208911_s_at
ggcactgcccaggcttaaaggtggtcagtccctggaattcagaggatgctaaaggacttattaaatcagccattcgggataacaatccagtggtggtgctagagaatgaattgatgtatggggttccttttgaatttcctccggaagctcagtcaaaagattttctgattcctattggaaaagccaaaatagaaaggcaaggaacacatataactgtggtttcccattcaagacctgtgggccactgcttagaagctgcagcagtgctatctaaagaaggagttgaatgtgaggtgataaatatgcgtaccattagaccaatggacatggaaaccatagaagccagtgtcatgaagacaaatcatcttgtaactgtggaaggaggctggccacagtttggagtaggagctgaaatctgtgccaggatcatggaaggtcctgcgttcaatttcctggatgctcctgctgttcgtgtcactggtgctgatgtccctatgccttatgcaaagattctagaggacaactctatacctcaggtcaa

SEQ ID NO: 480 - DNA, 498 bp, Homo sapiens
  misc_feature (1)..(498): 208964_s_at
ggcttcctcactccaaaataggtgctgatccttcctattcctattctttgccaccttttgggtgtggtgtcaccagcctgtttagccaagtagctttgggcataggctgcccaatctgagcaaacaccagtgaggctctattgagccaagaccaagtcctcaaagcacctgaaccactgtggccttctcagcctacagcagtgtggtctcttacatggccacaaagggacacacagtgacaaaaggctcggaatgttacaatggtaaaatgagtgatctcaaatccactgacagatataaaataggcttagagaggaaaagctgcctctggtcaagtagatcatggcagcatgaattccaactcacttttttacaactccaacttctatgtttatctttgttactttcacttttttacaacctggccagaggcattttttaaatcaggcccaatatcagtattctttttgtgtgtgccaattttgttatcacatccct

SEQ ID NO: 481 - DNA, 415 bp, Homo sapiens
  misc_feature (1)..(415): 208967_s_at
tttggagacccccttgtgcaaaaatggttttcttctggatggcttccctcggactgtgaggcaggcagaaatgctcgatgacctcatggagaagaggaaagagaagcttgattctgtgattgaattcagcatcccagactctctgctgatccgaagaatcacaggaaggctgattcaccccaagagtggccgttcctaccacgaggagttcaaccctccaaaagagcccatgaaagatgacatcaccggggaacccttgatccgtcgatcagatgataatgaaaaggccttgaaaatccgcctgcaagcctaccacactcaaaccaccccactcatagagtactacaggaaacgggggatccactccgccatcgatgcatcccagacccccgatgtcgtgttcgcaagcatccta

SEQ ID NO: 482 - DNA, 523 bp, Homo sapiens
  misc_feature (1)..(523): 209062_x_at
ggatgggcttttggcaggacccacaatgccacaagctcctccgcaacagtttccatatcaaccaaattatggaatgggacaacaaccagatccagcctttggtcgagtgtctagtcctcccaatgcaatgatgtcgtcaagaatgggtccctcccagaatcccatgatgcaacacccgcaggctgcatccatctatcagtcctcagaaatgaagggctggccatcaggaaatttggccaggaacagctccttttcccagcagcagtttgcccaccaggggaatcctgcagtgtatagtatggtgcacatgaatggcagcagtggtcacatgggacagatgaacatgaaccccatgcccatgtctggcatgcctatgggtcctgatcagaaatactgctgacatctctgcaccaggacctcttaaggaaaccactgtacaaatgacactgcactaggattattgggaaggaatcattgttccaggcatccatcttggaagaaaggaccagctttgagctccatc

SEQ ID NO: 483 - DNA, 384 bp, Homo sapiens
  misc_feature (1)..(384): 209096_at
ctcttgaaaggcactgtcatttaaacataaacctggagtactcgaaatagaattcaggtttacaagatgaaagcgtgtggagaagtgtcagatggcagtggaagcatgtgtgtttctaaaaagtaaaaatctcaagaaaacagaaatggcatgctttacccatcttacttagtgaaagagagctgcagttgaaattgtttaaaaagtagcaggtacaatgaatattgtcacagatgtgttaatttttgaagcaatgtgggtgctgactactagtagtatcaaaaatatgttcaggattgttttgatacctgtatttataataaaaaatgttggggggagttgatgaattcctgttaaaagctgttcttgtgtgttacatgtaac

SEQ ID NO: 484 - DNA, 552 bp, Homo sapiens
  misc_feature (1)..(552): 209160_at
atgtcatccgtatttcaaccggagtaaattgctagatttctgcaagtcgaaagatattgttctggttgcctatagtgctctgggatctcaacgagacaaacgatgggtggacccgaactccccggtgctcttggaggacccagtcctttgtgccttggcaaaaaagcacaagcgaaccccagccctgattgccctgcgctaccagctgcagcgtggggttgtggtcctggccaagagctacaatgagcagcgcatcagacagaacgtgcaggtttttgagttccagttgactgcagaggacatgaaagccatagatggcctagacagaaatctccactattttaacagtgatagttttgctagccaccctaattatccatattcagatgaatattaacatggagggctttgcctgatgtctaccagaagccctgtgtgtggatggtgacgcagaggacgtctctatgccggtgactggacatatcacctctacttaaatccgtcctgtttagcgacttcagtcaactacagctgagtccataggccagaaag

SEQ ID NO: 485 - DNA, 487 bp, Homo sapiens
  misc_feature (1)..(487): 209183_s_at
aactcatacgtcctgtggtggcattgggagagttcccccatgatgagggccaagatagaatctgtaccactcagtgctaccatccccacccctacaccacttccacacaggggcctcatggcatggtcagggtcccagctgtaggtgagagcagggcactgtccagctgtccactggggaagtcaagatgtcctaaggcccaggtcagggcatctggagtctgaaggaccctagttcctagaggcatctggcagcaagaaggtgaggcatcagggaacgggaatcaggctgggactgatcagaggtgaagggacagagagaggagaggaggaagattgagctgggggcaacagccaagctcacctgggcaggtctctgccacctccttgctctgtgagctgtcagtctaggttattctctttttttgtggctatttttaattgctttggatttgttaaatgttttctgtcttctgttaagtgtgttt

SEQ ID NO: 486 - DNA, 482 bp, Homo sapiens
  misc_feature (1)..(482): 209199_s_at
gggtcaactgacatccattgtatatactagtttctttcatgctatttttattttgttttttgcatttttatcaaatgcagggcccctttctgatctcaccatttcaccatgcatcttggaattcagtaagtgcatatcctaacttgcccatattctaaatcatctggttggttttcagcctagaatttgatacgctttttagaaatatgcccagaatagaaaagctatgttggggcacatgtcctgcaaatatggccctagaaacaagtgatatggaatttacttggtgaataagttataaattcccacagaagaaaaatgtgaaagactgggtgctagacaagaaggaagcaggtaaagggatagttgctttgtcatccgtttttaattattttaactgacccttgacaatcttgtcagcaatataggactgttgaacaatcccggtgtgtcaggacccccaaatgtcacttctgcataaa

SEQ ID NO: 487 - DNA, 447 bp, Homo sapiens
  misc_feature (1)..(447): 209200_at
ggagcaatccaagccacatatcttctacatcaaatttttccattttggttattttcataatctggtattgcattttgccttccctgttcatacctcaaattgattcatacctcagtttaattcagagaggtcagttaagtgacggattctgttgtggtttgaatgcagtaccagtgttctcttcgagcaaagtagacctgggtcactgtaggcataggacttggattgcttcagatggtttgctgtatcatttttcttctttttcttttcctggggacttgtttccattaaatgagagtaattaaaatcgcttgtaaatgagggcatacaagcatttgcaacaaatattcaaatagaggctcacagcggcataagctggactttgtcgccactagatgacaagatgttataactaagttaaaccacatctgtgtatctcaagggact

SEQ ID NO: 488 - DNA, 459 bp, Homo sapiens
  misc_feature (1)..(459): 209201_x_at
agcacatcatggttggccttatcctgcctggtattgtcatcctgtcctgctattgcattatcatctccaagctgtcacactccaagggccaccagaagcgcaaggccctcaagaccacagtcatcctcatcctggctttcttcgcctgttggctgccttactacattgggatcagcatcgactccttcatcctcctggaaatcatcaagcaagggtgtgagtttgagaacactgtgcacaagtggatttccatcaccgaggccctagctttcttccactgttgtctgaaccccatcctctatgctttccttggagccaaatttaaaacctctgcccagcacgcactcacctctgtgagcagagggtccagcctcaagatcctctccaaaggaaagcgaggtggacattcatctgtttccactgagtctgagtcttcaagttttcactccagctaacaca

SEQ ID NO: 489 - DNA, 521 bp, Homo sapiens
  misc_feature (1)..(521): 209208_at
ttcctggtcatgcactacagaggacagactgtgaaaggtgtcgctttcctcgcttgctacggcctggtcctgctggtgcttctctcacctctgacgcccttgactgtagtcaccctgctccaggcctccaatgtgcctgctgtggtggtggggaggcttctccaggcagccaccaataccacaacgggcacacaggccagctctcagccatcacagtcttcctgctgtttgggggctccctggcccgaatcttcacttccattcaggaaaccggagatcccctgatggctgggacctttgtggtctcctctctctgcaacggcctcatcgccgcccagctgctcttctactggaatgcaaagcctccccacaagcagaaaaaggcgcagtagagccagctactggagtcattccgtttccactcattcacccaacctcagggttctccccatctgagccagcctgctggtgtgacttactcatcctccattcctctgcacttgcagactttctgagccagg

SEQ ID NO: 490 - DNA, 432 bp, Homo sapiens
  misc_feature (1)..(432): 209215_at
ctggctatggctcaccagggcagaagggcacggtcatgggtacactgcgcagcctaggtgctctggccagggccgcggggcccctggtggccgcttcagtgtactggctggccggggcccaggcctgcttcaccacgtggtccgggctctttttgctccccttcttcctcctgcagaagctgagttacccggcacagacgctcaaggctgagtagctgagccactgtgcccaggctgtgggcaccaggcagagtgggagcctaggtcaggcccctgcccactgcctgacccccaccccccgccagtccagggagaccctgtgggtgggggccggcccctaagcaggaagctcaggcagctcctccagacttacttactccttcagtgactccgagctgcagcactccaaggctgtcagggcttctgtttgtt

SEQ ID NO: 491 - DNA, 293 bp, Homo sapiens
  misc_feature (1)..(293): 209301_at
tgaatcttcgggtgtttccctttagctaagcacagatctaccttggtgatttggaccctggttgctttgtgtctagttttctagacccttcatctcttacttgatagacttactaataaaatgtgaagactagaccaattgtcatgcttgacacaactgctgtggctggttggtgctttgtttatggtagtagtttttctgtaacacagaatataggataagaaataagaataaagtaccttgactttgttcacagcatgtagggtgatgagcactcacaattgttgactaaa

SEQ ID NO: 492 - DNA, 503 bp, Homo sapiens
  misc_feature (1)..(503): 209318_x_at
gaattctcgaactgcatgtattgtgccaatctgtcctgagtgttcatgctttgtaccaaatttaatgaacgcgtgttctgtaatcaaactgcaaatattgtcataaccaacatccaaaatgacggctgctatatataagtgtttgtcatatggaatttaatcgtaagccatgatcataatgttaactaaataactttatgtggcactgcctagtaagggaactatggaaaggtttggatttctccaaatctgggagaattttcaaaataagaaaataacctttatatgatatactatgactaggctgtgtatttcttttcagggatttttctaccttcagggttggatgtagtttagttactattaccatagccaacctgtagttttacatatacattttcttgtggagcaatagagttctccattttacagaagcattttaaatgtagtttgaatattttccacaagatgctgcaatgtgagttatcacttcatttatctta

SEQ ID NO: 493 - DNA, 411 bp, Homo sapiens
  misc_feature (1)..(411): 209360_s_at
gttggttatttgtgttattctggatgtataaaaatcaatggaaaaaaataaactttcaaattgaaatgacggtataacacatctactgaaaaagcaacgggaaatgtggtcctatttaagccagcccccacctagggtctatttgtgtggcagttattgggtttggtcacaaaacatcctgaaaattcgtgcgtgggcttctttctccctggtacaaacgtatggaatgcttcttaaaggggaactgtcaagctggtgtcttcagccagatgacatgagagaatatcccagaaccctctctccaaggtgtttctagatagcacaggagagcaggcactgcactgtccacagtccacggtacacagtcgggtgggccgcctcccctctcctgggagcattcgtcgtgcccag

SEQ ID NO: 494 - DNA, 491 bp, Homo sapiens
  misc_feature (1)..(491): 209365_s_at
gagtatgctgtgaagacccaccaccacttgtgttgccgccaccctcccagccctactcgggatgagtgctttgcccgtcgggctccttaccccaactatgaccgggacatcttgaccattgacatcagtcgagtcacccccaacctcatgggccacctctgtggaaaccaaagagttctcaccaagcataaacatattcctgggctgatccacaacatgactgcccgctgctgtgacctgccatttccagaacaggcctgctgtgcagaggaggagaaattaaccttcatcaatgatctgtgtggtccccgacgtaacatctggcgagaccctgccctctgctgttacctgagtcctggggatgaacaggtcaactgcttcaacatcaattatctgaggaacgtggctctagtgtctggagacactgagaacgccaagggccagggggagcagggctcaactggaggaacaaatatcagctccacctctga

SEQ ID NO: 495 - DNA, 269 bp, Homo sapiens
  misc_feature (1)..(269): 209395_at
gctgtggggatagtgaggcatcgcaatgtaagactcgggattagtacacacttgttgatgattaatggaaatgtttacagatccccaagcctggcaagggaatttcttcaactccctgccccctagccctccttatcaaaggacaccattttggcaagctctatcaccaaggagccaaacatcctacaagacacagtgaccatactaattataccccctgcaaagccagcttgaaaccttcacttaggaacgtaatcgtgtcccctatc

SEQ ID NO: 496 - DNA, 486 bp, Homo sapiens
  misc_feature (1)..(486): 209409_at
tgtatctctgcctgtgattttcttttctaaatgaaactccatgtagcaaccaggacgaagttgagaaggaaaacgccaaatgctttggttattagagtttaataggtaagctctgttacactaggtgttagagttccagaatgttcttttgtttgctaaaccttgaagaaacatgtgcctcagcctagatgttttgtcttctcttttctgcacttaatacctgacagtatgaccgatctctgcgcctttctgggggcgggcaagctggcggtagatttgtgatgtcacagtgcaaactgcagtgactgtaaattggcctggcgtgtataaacgttttcagggaatgcagaaggtattaatgaagagacaaaacctttattccatgtgctttgcttcattctgtacatagctctttggctcgtgaacctaattgtaaactttcaggtatttttgtacaaataagggactgatgttctgtttcttgta

SEQ ID NO: 497 - DNA, 315 bp, Homo sapiens
  misc_feature (1)..(315): 209488_s_at
aagctcacatctaaacagcctgtaggttttgtcagttttgacagtcgctcagaagcagaggctgcaaagaatgctttgaatggcatccgcttcgatcctgaaattccgcaaacactacgactagagtttgctaaggcaaacacgaagatggccaagaacaaactcgtagggactccaaaccccagtactcctctgcccaacactgtacctcagttcattgccagagagccatatgagctcacagtgcctgcactttaccccagtagccctgaagtgtgggccccgtaccctctgtacccagcggagttagcgcct

SEQ ID NO: 498 - DNA, 433 bp, Homo sapiens
  misc_feature (1)..(433): 209501_at
attaaccaatactccaagtccttgagttttgttatatctgaactagttgaactgtgactgacaggtaatcctaatatatccaaatccaactgaataccaaattgagatggcaaatttttgtttgatataagttagcttgttagcatatgccctagagggcctccatccctgtattctaatgtttttactcaaagctctagcctttaggataggtgaatatgtaaatcttttatcactttctcaaattcaaactaaaggggaaagatcaaaccccttcccttcctacctgttttctgagctggctgacttgccagccacaagctgctcttgcagagttcttaccattcctgtaaatgttttgacttgttgcagaaattcctatctactttattaagcagtattgatctgactgtggaaacatcctctcacttgc

SEQ ID NO: 499 - DNA, 516 bp, Homo sapiens
  misc_feature (1)..(516): 209515_s_at
agatgcctgtttgctatttggtggaagatagatgttcatattgaagcagtcacatttgtactgtagttcaataaaagaaaaatgaagtattctgtagcctatatttttcatagagctcatgagcatttactgtacttgctgggtcttgccaagatcatttattccgctgcattgccaaagtgtcttcataccaaattaaaggtggttttaatatatgtttcatggaagttgtttataaaattcaaaggtatttcatttaggtgaaaagtcttatttattaaagtggtttgaataaagtagatcaaaacttccagagatcttaatggctatataggaagaaatatcactcaccataatttaaataaagaataaaaatacatgtattttatggtggcaaatgtttggtagaactgtaattagaaaaatacaagtatatttgcgtgatggttacactagaagcccagactttacgactacacaatatattcatgtatctaaactgtacttgtaccccct

SEQ ID NO: 500 - DNA, 501 bp, Homo sapiens
  misc_feature (1)..(501): 209517_s_at
acttaccgccctatgagtgacatgggctggggcgccgtggtagagcacaccctggctgacgtcttgtatcacgtggagacagaagtggatgggaggcgcagtcccccatgggaaccctgaccaggtccctcttttctgtcaaggactttctgggaataatactgggggttttgtttttgtttttgaactgtctcaaatgttctcccaaagatgctaaaaacacagcctctccttttagcaagttaaaaggctgggtaggactgcgggagactgcctgcctttcaccattttctccccacttccagtgactgctcttattttgtgtaccataagccaacaaccgctgactccaggattgcataagccccctgtgaaatcggtgctgtactgcataccctgccagctgtgacttgttatcctactatattttctaaggagtgaataatattgtccgagtaactaacttatttaaaagacatttccttctgtgggcattgactg

SEQ ID NO: 501 - DNA, 348 bp, Homo sapiens
  misc_feature (1)..(348): 209536_s_at
cagggggcttaccagcaaagccatattcggctaggaatttggaattcacaacctttattaacccctggcaaaacttcccgtttgcatgtcaaatcacattgaagcctgaagattagcttttcttactggtttttccaataagtaatagcaaagcccacttatcatacttaaactacagtaaagaaaagaggtggttctctgcagtgatcgtttagtgtggccctcaaacattaaatatccccaggtctccttggtgggtggcaggatttaaattcaatcaaatcctgtcctagtgtgtgcagtgtcttcggccctgtggacacaggtgaatgagggaccagccctgcc

SEQ ID NO: 502 - DNA, 502 bp, Homo sapiens
  misc_feature (1)..(502): 209543_s_at
ccctctaccatttgcagagtcctgcacagttttctggctggagcctagaacaggcctcccaagttttaggacaaacagctcagttctagtctctctggggccacacagaaactctttttgggctcctttttctccctctggatcaaagtaggcaggaccatgggaccaggtcttggagctgagcctctcacctgtactcttccgaaaaatcctcttcctctgaggctggatcctagccttatcctctgatctccatggcttcctcctccctcctgccgactcctgggttgagctgttgcctcagtcccccaacagatgcttttctgtctctgcctccctcaccctgagccccttccttgctctgcacccccatatggtcatagcccagatcagctcctaacccttatcaccagctgcctcttctgtgggtgacccaggtccttgtttgctgttgatttctttccagaggggttgagcagggatcctggtttcaatgacggtt

SEQ ID NO: 503 - DNA, 519 bp, Homo sapiens
  misc_feature (1)..(519): 209576_at
gtggtctcttttaagttttgcagttcatggtaaaatgcattttcaaaccaaatgagtacttatatatggatctctgtagactagagtcttgcagcaacacagaatgtaatataaggcaaatgcatctgggacttgaccaaagttgttctgttttgtttttttaactgaaagtaacagaaggacctttcttaaatgtgacagatggtcctgcagtgtgaaactgaaggacagtgttaaagctgggctctagtatactgatgatttctgcataagtgtaaatatgcaaatgtatgtatacatgtatttatgactttagttttcgacattatttttaggttttaagagtggcaacttaggattttagggtgatggctttggaaataacataaatataccttgtactgaatgacagactattactacgtttgccagttttaaacagctttatttatgttcatgtcctgtaaatttttaagtacagtaattaatattaggaaacattacagcccttatctagat

SEQ ID NO: 504 - DNA, 426 bp, Homo sapiens
  misc_feature (1)..(426): 209604_s_at
ttcgacttgcatttttgcaggagcagtatcatgaagcctaaacgcgatggatatatgtttttgaaggcagaaagcaaaattatgtttgccactttgcaaaggagctcactgtggtgtctgtgttccaaccactgaatctggaccccatctgtgaataagccattctgactcatatcccctatttaacagggtctctagtgctgtgaaaaaaaaaaaatgctgaacattgcatataacttatattgtaagaaatactgtacaatgactttattgcatctgggtagctgtaaggcatgaaggatgccaagaagtttaaggaatatgggagaaatagtgtggaaattaagaagaaactaggtctgatattcaaatggacaaactgccagttttgtttcctttcactggccacagttgtttgatgcatta

SEQ ID NO: 505 - DNA, 458 bp, Homo sapiens
  misc_feature (1)..(458): 209616_s_at
agacctgttcctggacttgatagcagatgtgatgtttggtgtcccatctgtgattgtggcccggaaccacagagatgctggagcacccacctacatgtatgagtttcagtaccgtccaagcttctcatcagacatgaaacccaagacggtgataggagaccacggggatgagctcttctccgtctttggggccccatttttaaaagagggtgcctcagaagaggagatcagacttagcaagatggtgatgaaattctgggccaactttgctcgcaatggaaaccccaatggggaagggctgccccactggccagagtacaaccagaaggaagggtatctgcagattggtgccaacacccaggcggcccagaagctgaaggacaaagaagtagctttctggaccaacctctttgccaagaaggcagtggagaagccaccccagacagaacacatagagc

SEQ ID NO: 506 - DNA, 492 bp, Homo sapiens
  misc_feature (1)..(492): 209657_s_at
ttcaggtgttactcagctgcatagttacgcagatgtaatgcacattattggcgtatctttaagttggattcaaatggccatttttctccaattttggtaaattggatatcttttttttacaaatacgaccattaacctcagttaaatttttgtttgttttcctgtttgatgctgtctatttgcattgagtgtaagtcatttgaactaatggtataactcctaaagcttctctgctccagttatttttattaaatatttttcacttggcttatttttaaaactgggaacataaagtgcctgtatcttgtaaaacttcatttgtttcttttggttcagagaagttcatttatgttcaaagacgtttattcatgttcaacaggaaagacaaagtgtacgtgaatgctcgctgtctgatagggttccagctccatatatatagaaagatcgggggtgggatgggatggagtgagccccatccagttagttggacta

SEQ ID NO: 507 - DNA, 372 bp, Homo sapiens
  misc_feature (1)..(372): 209670_at
caactggatcctacccgaatttatgattaagattgctgaagagctgccaaacactgctgccaccccctctgttcccttattgctgcttgtcactgcctgacattcacggcagaggcaaggctgctgcagcctcccctggctgtgcacattccctcctgctccccagagactgcctccgccatcccacagatgatggatcttcagtgggttctcttgggctctaggtcctggagaatgttgtgaggggtttatttttttttaatagtgttcataaagaaatacatagtattcttcttctcaagacgtggggggaaattatctcattatcgaggccctgctatgctgtgtgtctgggcgtgttgtatgtcctgc

SEQ ID NO: 508 - DNA, 503 bp, Homo sapiens
  misc_feature (1)..(503): 209674_at
tattcttcattgatggaaagcagttacatattgaaatatgttgtttctaatgacatttctgtggtttttaactttttaatgaatttcacagaggacaattggtaatttgtatataaagaacttggcaagagaatttgcttaatgtaaatataaacagtcacaattagtatagacccatcgatatatttttgataatttttcatgtatggtaaagttaaaatgacaaattgatattctgatataaaactcaaagtttgaagtcagtgggaaaaaaggaggtttttagactttcttaaaagacgttaaaattttaggacagaattttcttgatgttgtttaatctaactttgcactctttgataataatgttttagataatgtcgtaatccaaattggtattgtagcctctgttaacacagacagtatatgttttaaactttgatgtaaacctttttagacccaaacttgtggaagtatcatgtgttaagttctctgtctctgtt

SEQ ID NO: 509 - DNA, 484 bp, Homo sapiens
  misc_feature (1)..(484): 209728_at
gcatccaagcatgatgagccctctcacggtgcaatggagtgcacggtctgaatctgcacagagcaagatgctgagtggagtcgggggctttgtgctgggcctgctcttccttgggacagggctgttcatctacttcaggaatcagaaaggacactctggacttcagccaacaggactcttgagctgaagtgcagatgaccacattcaaggaagaaccttctgccccagctttgcaagatgaaaagctttcccacttggctcttattcttccacaagagctttgtcaggaccaggttgttactggttcagcaactctgcagaaaatgtcctcccttgtggcttccttagctcctgttcttggcctgaagcctcacagctttgatggcagtgcctcatcttcaacttttgtgcttccctttacctaaactgtcctgcctcccgtgcatctgtactccccttgtgccacacattgcattattaaatg

SEQ ID NO: 510 - DNA, 459 bp, Homo sapiens
  misc_feature (1)..(459): 209771_x_at
  misc_feature (32)..(32): n is a, c, g, or t
  misc_feature (78)..(78): n is a, c, g, or t
  misc_feature (82)..(82): n is a, c, g, or t
  misc_feature (242)..(242): n is a, c, g, or t
tcacaaacttttatactctttctgtatatacnttttttttctttaaaaaacaactatggatcagaatagccacatttngaanactttttgttatcagtcaatatttttagatagttagaacctggtcctaagcctaaaagtgggcttgattctgcagtaaatcttttacaactgcctcgacacacataaacctttttaaaaatagacactccccgaagtcttttgttcgcatggtcacacanctgatgcttagatgttccagtaatctaatatggccacagtagtcttgatgaccaaagtcctttttttccatctttagaaaactacatgggaacaaacagatcgaacagttttgaagctactgtgtgtgtgaatgaacactcttgctttattccagaatgctgtacatctattttggattgtatattgtgtttgtgtatttacgctttgattcatagt

SEQ ID NO: 511 - DNA, 571 bp, Homo sapiens
  misc_feature (1)..(571): 209774_x_at
agagagacacagctgcagaggccacctggattgcgcctaatgtgtttgagcatcacttaggagaagtcttctatttatttatttatttatttatttatttgtttgttttagaagattctatgttaatattttatgtgtaaaataaggttatgattgaatctacttgcacactctcccattatatttattgtttattttaggtcaaacccaagttagttcaatcctgattcatatttaatttgaagatagaaggtttgcagatattctctagtcatttgttaatatttcttcgtgatgacatatcacatgtcagccactgtgatagaggctgaggaatccaagaaaatggccagtaagatcaatgtgacggcagggaaatgtatgtgtgtctattttgtaactgtaaagatgaatgtcagttgttatttattgaaatgatttcacagtgtgtggtcaacatttctcatgttgaagctttaagaactaaaatgttctaaatatcccttggacattttatgtctttcttgtaagatactgccttgtttaatgttaattatgcagtgtttccctc

SEQ ID NO: 512 - DNA, 559 bp, Homo sapiens
  misc_feature (1)..(559): 209790_s_at
caggaaagtttctcagcgccgagtggacttttgcaaagacccaagtgcaattggaaagaagcaggttccctgttttgcctcaatgctaactaaaaagctgcatttctttccaaaatctaattaattaatagaggctatctaattttacactctgtattgaaaatggctttctcagccaggcgtggttactcacacctgtaatcccagcactttgggagtccaaggtgggcggatcacctgaggtcgggagttcgagaccagcctgaccaacatggagaagccccgtctctactaaaaatgcaaaaaaaaatttagctaggcatggcggcgcatgcctgcaatcccagctacttggaaggctgaggcaggagaatcacttgaacccaggaggtggaggctgcggtgagccgagattgcgccattgcactccagcctgggcaacgagtgaaactccgtctcaaaaaaaagaaaatgtctttctcttccttttatataaatatcgttagggtgaagcattatggtccaatgattcaaatgttttaaagtttaatgcctagca

SEQ ID NO: 513 - DNA, 532 bp, Homo sapiens
  misc_feature (1)..(532): 209813_x_at
aaatgatacactactgctgcagctcacaaacacctctgcatattacatgtacctcctcctgctcctcaagagtgtggtctattttgccatcatcacctgctgtctgcttagaagaacggctttctgctgcaatggagagaaatcataacagacggtggcacaaggaggccatcttttcctcatcggttattgtccctagaagcgtcttctgaggatctagttgggctttctttctgggtttgggccatttcagttctcatgtgtgtactattctatcattattgtataacggttttcaaaccagtgggcacacagagaacctcactctgtaataacaatgaggaatagccacggcgatctccagcaccaatctctccatgttttccacagctcctccagccaacccaaatagcgcctgctatagtgtagacatcctgcggcttctagccttgtccctctcttagtgttctttaatcagataactgcctggaagcctttcattttacacgccctgaagcagtcttctttgcta

SEQ ID NO: 514 - DNA, 427 bp, Homo sapiens
  misc_feature (1)..(427): 209825_s_at
gtacgagacctgttccagatgaagctttttgtggatacagatgcggacacccggctctcacgcagagtattaagggacatcagcgagagaggcagggatcttgagcagattttatctcagtacattacgttcgtcaagcctgcctttgaggaattctgcttgccaacaaagaagtatgctgatgtgatcatccctagaggtgcagataatctggtggccatcaacctcatcgtgcagcacatccaggacatcctgaatggagggccctccaaacggcagaccaatggctgtctcaacggctacaccccttcacgcaagaggcaggcatcggagtccagcagcaggccgcattgacccgtctccatcggaccccagcccctatctccaagagacagaggaggggtcaggaggcactgctcatctgtac

SEQ ID NO: 515 - DNA, 508 bp, Homo sapiens
  misc_feature (1)..(508): 209871_s_at
  misc_feature (120)..(120): n is a, c, g, or t
tttccagactctagggttttccaatgtgactaatgaccacacctgcctctcccgtcgtctcttctgggcaccctcccacccggctgcatacccggccagggctcccacagagacaagganggcacaggtgtctgccccctctttaaaatcgatctacacacatccacgcacatgcgaccccgagggaaacgaaacccactctagaaaacgcgaccttggccgcacctaaagcagccagccgtgagtgcagaccccttggccagcgtggcgcagtggccctgagcagtagtggcatgtgtgtagatcaagtcggatctagtccagctcggttcattagcgatccatgtaatctgacgtcatcttgtctcgaagtctctttttttggcccaggccttgaagaatacactgtgacttaagaagccttaccacgcagtaactaaagctttaggatgactgtattcgaggagtgccgtgtgttgcatgcagctacccgtaggaagacttcgcg

SEQ ID NO: 516 - DNA, 383 bp, Homo sapiens
  misc_feature (1)..(383): 209879_at
caaggaagatggagctcccccatcccacacgcactgcactgccattgtcttttggttgccatggtcaccaaacaggaagtggacattctaagggaggagtactgaagagtgacggacttctgaggctgtttcctgctgctcctctgacttggggcagcttgggtcttcttgggcacctctctgggaaaacccagggtgaggttcagcctgtgagggctgggatgggtttcgtgggcccaaagggcagacctttctttgggactgtgtggaccaaggagcttccatctagtgacaagtgacccccagctatcgcctcttgccttcccctgtggccactttccagggtggactctgtcttgttcactgcagtatcccaactgcag

SEQ ID NO: 517 - DNA, 305 bp, Homo sapiens
  misc_feature (1)..(305): 209903_s_at
aggccaagacccatgttcttgacattgagcagcgactacaaggtgtaatcaagactcgaaatagagtgacaggactgccgttatctattgaaggacatgtgcattaccttatacaggaagctactgatgaaaacttactatgccagatgtatcttggttggactccatatatgtgaaatgaaattatgtaaaagaatatgttaataatctaaaagtaatgcatttggtatgaatctgtggttgtatctgttcaattctaaagtacaacataaatttacgttctcagcaactgttatttctctctg

SEQ ID NO: 518 - DNA, 142 bp, Homo sapiens
  misc_feature (1)..(142): 209905_at
actatgaaaccgccattgggctactgtagatttgtatccttgatgaatctggggtttccatcagactgaacttacactgtatattttgcaatagttacctcaaggcctactgaccaaattgttgtgttgagatgatatttaa

SEQ ID NO: 519 - DNA, 568 bp, Homo sapiens
  misc_feature (1)..(568): 209907_s_at
atctatgcaaacacctttcccataaagaaaccaaaccccatagtacagtgccttgtcctagtgttcacatgttcagctctgtttgtttagatgccaaggtttccattttcagggctataaaaagtattacttggaaatgaggcatcagaccaccagatgttaccgctcggttgaatgtgtccaccgtggagtggtttggtgacgctgtaaccattccacgccagtgacctctgctgggtcacagccactcaggaggggaagggtcaggatgagaggctgcagcctcgacacttggcgcggcctgatactgaaatagcgtctactcgtgcactgaataaaaacagaaacttgatcattttattcctgattagattttatcactctctgctaagacaatatagtctggagtataagtgggaaagcttgatttaaatactgtgaactctaataatgtggaaaatatttttcaactttaattttctgaagtataaattatttatgtaaattcattgtttttgcatatttcttaggacatgcatctttaagctttatcattgcccatatgtac

SEQ ID NO: 520 - DNA, 507 bp, Homo sapiens
  misc_feature (1)..(507): 210031_at
aagcgcagatgctagcacatgccctaatgtctgtatcactctgtgtctgagtggcttcactcctgctgtaaatttggcttctgttgtcaccttcacctcctttcaaggtaactgtactgggccatgttgtgcctccctggtgagagggccgggcagaggggcagatggaaaggagcctaggccaggtgcaaccagggagctgcaggggcatgggaaggtgggcgggcaggggagggtcagccagggcctgcgagggcagcgggagcctccctgcctcaggcctctgtgccgcaccattgaactgtaccatgtgctacaggggccagaagatgaacagactgaccttgatgagctgtgcacaaagtggcataaaaaacagtgtggttacacagtgtgaataaagtgctgcggagcaagaggaggccgttgattcacttcacgctttcagcgaatgacaaaatcatctttgtgaaggcctcgcaggaagacgcaacacatgggacctat

SEQ ID NO: 521 - DNA, 544 bp, Homo sapiens
  misc_feature (1)..(544): 210036_s_at
  misc_feature (299)..(299): n is a, c, g, or t
  misc_feature (313)..(313): n is a, c, g, or t
gagccccacgtggggtgaggctgctgaactctggggttcccacattctccttcccttcaggatccgccacaaacagacactttttgcttccttaaagtaggatcaaatctagatcctctagcctgggcagtagaggaagaaatgctagcctggaagctcggcatttggtttcactaagggccatgtggttccctgcagcctcatgcctggccccttgacacatccaaagcaaagggagtcctgccccctccccccacttcctttctaccctgcctgtgcacagtgggtgggttggtgtnttctggacactgangacttcctcccccttttgcctgtccttccctccggccctgtgtgcctcagggcagatatagcaagctctttcgaccatagttgatggtaggacattttagactttgtttctcagctctgtacaaacacaaatacacacccccacaaaactaaaatcaaagtttcactacataacactgggccttactgcatgtggttcattctagcatttctgttctgtgctgtgctaagc

SEQ ID NO: 522 - DNA, 543 bp, Homo sapiens
  misc_feature (1)..(543): 210044_s_at
tgctccgcctagccatgaagtacatcggcttcctggtgcggctgctgcgcgaccaagccgcagctctggccgcaggccccacccctcccgggcctcgcaaacggccggtgcaccgggtcccagacgacggcgcccgccggggatccggacgcagggccgaggcggcagcgcgctcgcagcccgcgcccccggccgaccccgacggcagccccggtggagcggcccggcccatcaagatggagcaaaccgctttgagcccagaggtgcggtgaccgcacgcggcagcacctctgagccggagggcaccagggactcggcccagggccgtcaaggaaagggcagtggacgtgctgcgcatgttcgggagcgaactcccccgaagaaggaccagtgaagacgtcaggggcaaggtctcgggggtccggaagggtgatcatcgacccccaagggacccgcagacccttaaaaaaatcacccacaaccctctggaagtggccttgcccggtccccttcccaggggcgaggtcggcaaagcaacatggc

SEQ ID NO: 523 - DNA, 409 bp, Homo sapiens
  misc_feature (1)..(409): 210052_s_at
agtcaagtgaccagcctctgactgtgcctgtatctcccaaattctccactcgattccactgctaaactcagctgtgagctgcggataccgcccggcaatgggacctgctcttaacctcaaacctaggaccgtcttgctttgtcattgggcatggagagaacccatttctccagacttttacctacccgtgcctgagaaagcatacttgacaactgtggactccagttttgttgagaattgttttcttacattactaaggctaataatgagatgtaactcatgaatgtctcgattagactccatgtagttacttcctttaaaccatcagccggccttttatatgggtcttcactctgactagaatttagtctctgtgtcagcacagtgtaatctctattgctattgcccc

SEQ ID NO: 524 - DNA, 525 bp, Homo sapiens
  misc_feature (1)..(525): 210054_at
attctactcataggctttaccaagttttggagggagagaataagaaaaaagaattgtttctaactcatggaaaccttgaggaagtggctgagaaattgaaacagaatatttctttagtacaagatcagttggcagtatctgctcaagaacattctttctttctgtccaaacggaataaggatgtggacatgctttgtgatactttgtatcaaggaggaaatcagcttttgcttagtgatcaggagttaacagagcagtttcataaagttgaatctcaactgaataagctaaatcatctcctcactgatattcttgctgatgtgaagacaaaaagaaaaactttggcaaataataaattacatcaaatggaaagagaattctatgtatattttttaaaagatgaagattatctgaaagatattgtggagaatttagaaactcaatcaaagattaaggctgttagtcttgaagattgaaaattactgaaaactgaatctttattacgtgtcctcttttatttattag

SEQ ID NO: 525 - DNA, 538 bp, Homo sapiens
  misc_feature (1)..(538): 210084_x_at
ccggtcagcaggatcatcgtgcacccacagttctacatcatccagactggagcggatatcgccctgctggagctggaggagcccgtgaacatctccagccgcgtccacacggtcatgctgccccctgcctcggagaccttccccccggggatgccgtgctgggtcactggctggggcgatgtggacaatgatgagcccctcccaccgccatttcccctgaagcaggtgaaggtccccataatggaaaaccacatttgtgacgcaaaataccaccttggcgcctacacgggagacgacgtccgcatcatccgtgacgacatgctgtgtgccgggaacacccggagggactcatgccagggcgactctggagggcccctggtgtgcaaggtgaatggcacctggctacaggcgggcgtggtcagctgggacgagggctgtgcccagcccaaccggcctggcatctacacccgtgtcacctactacttggactggatccaccactatgtccccaaaaagccgtgagtcaggcctggggtgt

SEQ ID NO: 526 - DNA, 433 bp, Homo sapiens
  misc_feature (1)..(433): 210088_x_at
ctaccaatgccgaggtgctgcgtgtgctgggcaagcccaagcctgaagagatgaatgtcaagatgctggactttgagacgttcttgcccatcctgcagcacatttcccgcaacaaggagcagggcacctatgaggacttcgtggagggcctgcgtgtctttgacaaggagagcaatggcacggtcatgggtgctgagcttcggcacgtccttgccaccctgggagagaagatgactgaggctgaagtggagcagctgttagctgggcaagaggatgccaatggctgcatcaattatgaagcctttgtcaagcacatcatgtcagggtgaagcagagtcttccaggtgcctggcccttggctttagccataccagggtgagttaaagagaggccccggctgggtgagctgagatggagtcctcgacttatcacc

SEQ ID NO: 527 - DNA, 338 bp, Homo sapiens
  misc_feature (1)..(338): 210113_s_at
acaagttgccatctggtttgccttccagcactaaagtaatggaactttgatgatgcctttgctgggcattatgtgtccatgccagggatgccacagggggccccagtccaggtggcctaacagcatctcagggaatgtccatctggagctggcaagacccctgcagacctcatagagcctcatctggtggccacagcagccaagcctagagccctccggatcccatccaggcgcaaagaggaataggagggacatggaaccatttgcctctggctgtgtcacagggtgagccccaaaattggggttcagcgtgggaggccacgtggattcttggcttt

SEQ ID NO: 528 - DNA, 446 bp, Homo sapiens
  misc_feature (1)..(446): 210164_at
gccaagcggaccagagctgtgcagcccctcaggctacctagcaacaaggcccaggtgaagccagggcagacatgcagtgtggccggctgggggcagacggcccccctgggaaaacattcacacacactacaagaggtgaagatgacagtgcaggaagatcgaaagtgcgaatctgacttacgccattattacgacagtaccattgagttgtgcgtgggggacccagagattaaaaagacttcctttaagggggactctggaggccctcttgtgtgtaacaaggtggcccagggcattgtctcctatggacgaaacaatggcatgcctccacgagcctgcaccaaagtctcaagctttgtacactggataaagaaaaccatgaaacgctactaactacaggaagcaaactaagcccccgctgtaatgaaacaccttctctggagcca

SEQ ID NO: 529 - DNA, 544 bp, Homo sapiens
  misc_feature (1)..(544): 210225_x_at
ggacaggggcctgctgaggaggtccagcccagctgctgacgtccaggaagaaaacctctatgctgccgtgaaggacacacagtctgaggacagggtggagctggacagtcagcagagcccacacgatgaagacccccaggcagtgacgtatgccccggtgaaacactccagtcctaggagagaaatggcctctcctccctcctcactgtctggggaattcctggacacaaaggacagacaggtggaagaggacaggcagatggacactgaggctgctgcatctgaagcctcccaggatgtgacctacgcccagctgcacagcttgacccttagacggaaggcaactgagcctcctccatcccaggaaggggaacctccagctgagcccagcatctacgccactctggccatccactagcccggggggtacgcagaccccacactcagcagaaggagactcaggactgctgaaggcacgggagctgcccccagtggacaccagtgaaccccagtcagcctggacccctaacacagaccatgagga

SEQ ID NO: 530 - DNA, 538 bp, Homo sapiens
  misc_feature (1)..(538): 210254_at
tccacctactccattgctttatgaggtttaaggaaggaaggcggtataatccctattcaatatattttttctaaaatccaacttctgaccgcccagtaggaagaaaaatgagacattttttccattacagagaaatgcttcttgactttaacatcagcattataaaaagtgtcaaataaaaaattaccatcattatcattaaaataaattttcactgtatttgagatgggagggttaaggctcagggattttatttcagtgaactgctggaactcacacatgccctgatatgtaaatgatgatttatgttggcgagtctgagagcaagcccaaatgtgttcttcaaaggacaatgggaaactgtaaagtagagaactaaagaataaggcctttagaatctgacacatctgggttcaaattctgaaactgtcacttattacctgtatgaacatgggcaaattatctaatctctctgatctatttttcctcatctgtaaaataggtgtaataataacaactactttgtcggttgctctga

SEQ ID NO: 531 - DNA, 536 bp, Homo sapiens
  misc_feature (1)..(536): 210279_at
aacctcactcgactgacattttttttcttgattcctttgttcatcatgattgggtgctacttggtcattattcataatctccttcacggcaggacgtctaagctgaaacccaaagtcaaggagaagtccataaggatcatcatcacgctgctggtgcaggtgctcgtctgctttatgcccttccacatctgtttcgctttcctgatgctgggaacgggggagaacagttacaatccctggggagcctttaccaccttcctcatgaacctcagcacgtgtctggatgtgattctctactacatcgtttcaaaacaatttcaggctcgagtcattagtgtcatgctataccgtaattaccttcgaagcatgcgcagaaaaagtttccgatctggtagtctacggtcactaagcaatataaacagtgaaatgttatgaataataaggttctttcatttcaatcccatcaaaattcacttcactaactactctggcgtcaatggatattctgtataatactatcaagtcccttttctctt

SEQ ID NO: 532 - DNA, 461 bp, Homo sapiens
  misc_feature (1)..(461): 210321_at
gccaagtggaccacagctgtgcggcctctcaggctacctagcagcaaggcccaggtgaagccagggcagctgtgcagtgtggctggctggggttatgtctcaatgagcactttagcaaccacactgcaggaagtgttgctgacagtgcagaaggactgccagtgtgaacgtctcttccatggcaattacagcagagccactgagatttgtgtgggggatccaaagaagacacagaccggtttcaagggggactccggggggcccctcgtgtgtaaggacgtagcccaaggtattctctcctatggaaataaaaaagggacacctccaggagtctacatcaaggtctcacacttcctgccctggataaagagaacaatgaagcgcctctaacagcaggcatgagactaaccttcctctgggcctgaccatctctgggacagaggcaagaatccccaagggtg

SEQ ID NO: 533 - DNA, 443 bp, Homo sapiens
  misc_feature (1)..(443): 210358_x_at
gagacttggtggtctgagctgtcccaagtcctccggttcttcctcgggattggcgggtccacttgccagggctctgggggcagatttgtggggacctcagcctgcaccctcttctcctctggcttccctctctgaaatagccgaactccaggctgggctgagccaaagccagagtggccacggcccagggagggtgagctggtgcctgctttgacgggccaggccctggagggcagagacaatcacgggcggtcctgcacagattcccaggccagggctgggtcacaggaaggaaacaacattttcttgaaaggggaaacgtctcccagatcgctcccttggctttgaggccgaagctgctgtgactgtgtccccttactgagcgcaagccacagcctgtcttgtcaggtggaccctgtaaatacatcctttttctgctaacc

SEQ ID NO: 534 - DNA, 380 bp, Homo sapiens
  misc_feature (1)..(380): 210365_at
acagcaccctggagatgttaaggcagaagtcagttcttctgtccatccctctccccagccaggatagagctatcttttccatctcatcctcagaagagactcagaagaaagatgacagccctcagaatgcacgttatgaggaaggcagaatgtgggtctgtaattcctccgtgtcccttctccccctctgcaaaccgtcgtaacaataatagttcctaacacatgggacaattgtgaggattaaatgagttagcctgcagaaatcacttgatgcacagcacatgggaagcattgtgtgtatttattaatccttcacaaagtctttgagatatatttttatcaaatatttagcatggatcccggtacactttcaatactta

SEQ ID NO: 535 - DNA, 498 bp, Homo sapiens
  misc_feature (1)..(498): 210395_x_at
ctaccaatgccgaggtgctgcgtgtgctgggcaagcccaagcctgaagagatgaatgtcaagatgctggactttgagacgttcttgcccatcctgcagcacatttcccgcaacaaggagcagggcacctatgaggacttcgtggagggcctgcgtgtctttgacaaggagagcaatggcacggtcatgggtgctgagcttcggcacgtccttgccaccctgggagagaagatgactgaggctgaagtggagcagctgttagctgggcaagaggatgccaatggctgcatcaattatgaagcctttgtcaagcacatcatgtcagggtgaagcagagtcttccaggtgcctggcccttggctttagccataccagggtgagttaaagagaggccccggctgggtgagctgagatggagtcctcgacttatcaccacaccactgccccaaggaccttacaggccctccctgttaataaacagctctaacacggccaggct

SEQ ID NO: 536 - DNA, 452 bp, Homo sapiens
  misc_feature (1)..(452): 210401_at
ggctggccgtatgatctgtgtggatggcaaactccccaggccattctgggacctaagtttaagaagtgccgtcctcgaactttctgactctaagctcctgagcgggagtcagacttagccctgagcctgcacttcctgttcaggtgcagacactgaacagggtctcaaacaccttcagcatgtgtgttgtgtgctcacgtgccacacagtgtctcatgcacacaacccagtgtacacaccacctacgtgcacacagcatccttccacactgtgtatgtgaacagcttgggccctgcaaacacaaccatctacacacatctacacccccaagcacacacacatggtccgtgccatgtcacctccatagggaaaggcttctctccaagtgtgccaggccaggacagccctcccagccatgaatccttactcagctacctcgggttggggtggga

SEQ ID NO: 537 - DNA, 552 bp, Homo sapiens
  misc_feature (1)..(552): 210426_x_at
ccgacgtcttcaaatccttaggttgtgaagactttattagctttgtgtttgaatttggaaagagtttatgttctatgcacctgactgaagatgaaattgcattattttctgcatttgtactgatgtcagcagatcgctcatggctgcaagaaaaggtaaaaattgaaaaactgcaacagaaaattcagctagctcttcaacacgtcctacagaagaatcaccgagaagatggaatactaacaaagttaatatgcaaggtgtctacattaagagccttatgtggacgacatacagaaaagctaatggcatttaaagcaatatacccagacattgtgcgacttcattttcctccattatacaaggagttgttcacttcagaatttgagccagcaatgcaaattgatgggtaaatgttatcacctaagcacttctagaatgtctgaagtacaaacatgaaaaacaaacaaaaaaattaaccgagacactttatatggccctgcacagacctggagcgccacacactgcacatcttttggtgatcggggtcaggca

SEQ ID NO: 538 - DNA, 459 bp, Homo sapiens
  misc_feature (1)..(459): 210439_at
gcttctgaagcagccaatgtcgatgcaacaacatttgtaactttaggtaaactgggattatgttgtagtttaacattttgtaactgtgtgcttatagtttacaagtgagacccgatatgtcattatgcatacttatattatcttaagcatgtgtaatgctggatgtgtacagtacagtacttaacttgtaatttgaatctagtatggtgttctgttttcagctgacttggacaacctgactggctttgcacaggtgttccctgagttgtttgcaggtttctgtgtgtggggtggggtatggggaggagaaccttcatggtggcccacctggcctggttgtccaagctgtgcctcgacacatcctcatcccaagcatgggacacctcaagatgaataataattcacaaaatttctgtgaaatcaaatccagttttaagaggagccacttatcaaagagat

SEQ ID NO: 539 - DNA, 447 bp, Homo sapiens
  misc_feature (1)..(447): 210479_s_at
cgtgcctttgactctcagaacaacaccgtgtactttgatgggaagtatgccagccccgacgtcttcaaatccttaggttgtgaagactttattagctttgtgtttgaatttggaaagagtttatgttctatgcacctgactgaagatgaaattgcattattttctgcatttgtactgatgtcagcagatcgctcatggctgcaagaaaaggtaaaaattgaaaaactgcaacagaaaattcagctagctcttcaacacgtcctacagaagaatcaccgagaagatggaatgctaacaaagttaatatgcaaggtgtctacattaagagccttatgtggacgacatacagaaaagctaatggcatttaaagcaatatacccagacattgtgcgacttcattttcctccattatacaaggagttgttcacttcagaatttgagccagca

SEQ ID NO: 540 - DNA, 349 bp, Homo sapiens
  misc_feature (1)..(349): 210502_s_at
tctgatgtcgtgcccatgacagcagagaatttccgctgcctgtgcactcatgaaaagggctttggctttaagggaagcagcttccaccgcatcatcccccagttcatgtgccagggcggtgatttcacaaaccacaatggcactgggggcaagtccatctatgggaagaagttcgatgatgaaaactttatcctcaagcatacgggaccaggtctactatccatggccaactctggcccaaacaccaatggctctcagttcttcctgacatgtgacaagacagactggctggatggcaagcatgtggtgtttggagaggtcaccgaaggcctagatgtcttgcggcaaa

SEQ ID NO: 541 - DNA, 511 bp, Homo sapiens
  misc_feature (1)..(511): 210512_s_at
atgagatgtatcttttgctctctcttgctctcttatttgtaccggtttttgtatataaaattcatgtttccaatctctctctccctgatcggtgacagtcactagcttatcttgaacagatatttaattttgctaacactcagctctgccctccccgatcccctggctccccagcacacattcctttgaaagagggtttcaatatacatctacatactatatatatattgggcaacttgtatttgtgtgtatatatatatatatatgtttatgtatatatgtgatcctgaaaaaataaacatcgctattctgttttttatatgttcaaaccaaacaagaaaaaatagagaattctacatactaaatctctctccttttttaattttaatatttgttatcatttatttattggtgctactgtttatccgtaataattgtggggaaaagatattaacatcacgtctttgtctctagtgcagtttttcgagatattccgtagtacatatttatt

SEQ ID NO: 542 - DNA, 354 bp, Homo sapiens
  misc_feature (1)..(354): 210549_s_at
gcttccattggaaaatccagtacttctggacatgctctggaggagaaagattggtcctcagatgaccctttctcatgctgcaggattccatgctactagtgctgactgctgcatctcctacaccccacgaagcatcccgtgttcactcctggagagttactttgaaacgaacagcgagtgctccaagccgggtgtcatcttcctcaccaagaaggggcgacgtttctgtgccaaccccagtgataagcaagttcaggtttgcatgagaatgctgaagctggacacacggatcaagaccaggaagaattgaacttgtcaaggtgaagggacacaagttgccagccaccaactttc

SEQ ID NO: 543 - DNA, 484 bp, Homo sapiens
  misc_feature (1)..(484): 210606_x_at
gaaagactctgactgctgttcttgccaagaaaaatgggttgggtaccggtgcaactgttacttcatttccagtgaacagaaaacttggaacgaaagtcggcatctctgtgcttctcagaaatccagcctgcttcagcttcaaaacacagatgaactggattttatgagctccagtcaacaattttactggattggactctcttacagtgaggagcacaccgcctggttgtgggagaatggctctgcactctcccagtatctatttccatcatttgaaacttttaatacaaagaactgcatagcgtataatccaaatggaaatgctttagatgaatcctgtgaagataaaaatcgttatatctgtaagcaacagctcatttaaatgtttcttggggcagagaaggtggagagtaaagacccaacattactaacaatgatacagttgcatgttatattattactaattgtctacttctggagtcta

SEQ ID NO: 544 - DNA, 484 bp, Homo sapiens
  misc_feature (1)..(484): 210644_s_at
cctgttggattcctcttcatctagaaagccagccaggcagctgtcctggagacaagagctggagactggaggtttctaaccagcatccagaaggttcgttagccaggtggtcccttctacaatcgagcagctccttggacagactgtttctcagttatttccagagacccagctacagttccctggctgtttctagagacccagctttattcacctgactgtttccagagacccagctaaagtcacctgcctgttctaaaggcccagctacagccaatcagccgatttcctgagcagtgatgccacctccaagcttgtcctaggtgtctgctgtgaacctccagtgaccccagagactttgctgtaattatctgccctgctgaccctaaagaccttcctagaagtcaagagctagccttgagactgtgctatacacacacagctgagagccaagcccagttctctgggttgtgctttactccac

SEQ ID NO: 545 - DNA, 494 bp, Homo sapiens
  misc_feature (1)..(494): 210655_s_at
agaattcccgccggaacgtgatgcttcgcaatgatccgatgatgtcctttgctgcccagcctaaccagggaagtgtggtcaatcagaacttgctccaccaccagcaccaaacccagggcgctcttggtggcagccgtgccttgtcgaattctgtcagcaacatgggcttgagtgagtccagcagccttgggtcagccaaacaccagcagcagtctcctgtcagccagtctatgcaaaccctctcggactctctctcaggctcctccttgtactcaactagtgcaaacctgcccgtcatgggccatgagaagttccccagcgacttggacctggacatgttcaatgggagcttggaatgtgacatggagtccattatccgtagtgaactcatggatgctgatgggttggattttaactttgattccctcatctccacacagaatgttgttggtttgaacgtggggaacttcactggtgctaagcaggcctcatct

SEQ ID NO: 546 - DNA, 253 bp, Homo sapiens
  misc_feature (1)..(253): 210664_s_at
gccagatttctgctttttggaagaagatcctggaatatgtcgaggttatattaccaggtatttttataacaatcagacaaaacagtgtgaacgtttcaagtatggtggatgcctgggcaatatgaacaattttgagacactggaagaatgcaagaacatttgtgaagatggtccgaatggtttccaggtggataattatggaacccagctcaatgctgtgaataactccctgactccgcaatcaaccaaggtt

SEQ ID NO: 547 - DNA, 472 bp, Homo sapiens
  misc_feature (1)..(472): 210746_s_at
ataataaccatcggcctgttcttctccaattttgagcgaaacccacccgagaacaccttccttagactcaccgccatggcaacacactctgaatccaaccttagctgctttgctcaggaagacattgccatttgtagaccacaccttgccatcaagatgccagagaaagcagagcagtatcaacccctcacagcctcagtcagcctccagaactccctagatgcccccatggaggactgtgtgatctccatcctgggaagggggctcattcacagagagaggagctacagattccgttcagtgtggcctgaaaacaccatgtgtgccaagttccagttcacgccaacacatgtggggctccagagactcactgtggaagtggactgcaacatgttccagaacctaaccaactataaaagcgtcaccgtggtagcccctgaactatcagcttaaacttccagctctatcacca

SEQ ID NO: 548 - DNA, 524 bp, Homo sapiens
  misc_feature (1)..(524): 210762_s_at
aaaacagtatggcacctcatcctgctcgagactacgttgttttaagaacctggaggactaatttacccaaaggagcctgtgcccttttactaacctctgtggatcacgatcgcgcacctgtggtgggtgtgagggttaatgtgctcttgtccaggtatttgattgaaccctgtgggccaggaaaatccaaactcacctacatgtgcagagttgacttaaggggccacatgccagaatggtacacaaaatcttttggacatttgtgtgcagctgaagttgtaaagatccgggattccttcagtaaccagaacactgaaaccaaagacaccaaatctaggtgatcactgaagcaacgcaaccgcttccaccaccatggtgtttgtttctagaacttttgccagtccttgaagaatgggttctgtgtctaatcctgaaacaaagaaaactacaagctggagtgtaggaattgactatagcaatttgatacatttttaaagctgcttcctgtttgttgagggtctgta

SEQ ID NO: 549 - DNA, 480 bp, Homo sapiens
  misc_feature (1)..(480): 210783_x_at
tgcaggaggcgcagggtcgcgccgagcgcgagcacggccgcttggagggctgcctgaaggggctgcgcctgggccacaagtgcttcctgctctcgcgcgacttcgaagcccagcccagcgcctcgccgcatccgctcagcccggaccagcccaacggtggcacgctcgagaactgcgtggcgcaggcctctgacgacggctcctggtgggaccacgactgccagcggcgtctctactacgtctgcgagttccccttctagcggggccggtaccccgcctccctgcccatcccaccacccggcctttccctgcgccgtgcccaccctcctccggaatctcccttcccttcctggccacgaatggcagcgtcctccccgacccccagtctgggcgcttctgggagggctcttgcggtgccggcactcctccttgttagtgtctttccttgaaggggcgggcaccaggctaggtccggtgcca

SEQ ID NO: 550 - DNA, 278 bp, Homo sapiens
  misc_feature (1)..(278): 210829_s_at
gggtcagatggtcccatgggtggattaggaggaatggagtcacatcacatgaatggctctttaggctcaggagatatggacagtatttccaagaattctcccaataatatgagcctgagtaatcaaccgggcactccaagggatgatggcgaaatggggggaaatttcttaaatccttttcagagtgagagttactcccctagcatgacaatgagcgtgtgatccattaccaagtctcctcatgaaaaccacagtgagtcagcccttcacagaactac

SEQ ID NO: 551 - DNA, 362 bp, Homo sapiens
  misc_feature (1)..(362): 210845_s_at
tgtccagtaccgcagtggggctgctcctcagcctggccctgcccatctcagcctcaccatcaccctgctaatgactgccagactgtggggaggcactctcctctggacctaaacctgaaatccccctctctgccctggctggatccgggggacccctttgcccttccctcggctcccagccctacagacttgctgtgtgacctcaggccagtgtgccgacctctctgggcctcagttttcccagctatgaaaacagctatctcacaaagttgtgtgaagcagaagagaaaagctggaggaaggccgtgggcaatgggagagctcttgttattattaatattgttgccgctgttgtgttgttg

SEQ ID NO: 552 - DNA, 529 bp, Homo sapiens
  misc_feature (1)..(529): 210849_s_at
atttcttcatctattcctgtactaatggtttctctttgcagttcacagagaatttggggctctcttcatgccttgaaattttggggtccatagtgaatattttgttatttatttgtttggctcattctttatatagtaatggaaacataagtctaggagttagaaatgaattttttagaccttagtaaaaccatttaaccataaaatggacaactgagaattctcccagctgcctgaaagcgtcgccaactgtggttatcctgcaagctgctacctgcaacttggacgttgtttccacgtgctctgctggctacgattcttgcattctgggtttggcttttttctgtgtcatcaactatggttatcctctaaataggcatttaatgaaacattgtacaaattgtcactcatttgatgacacctgggaataacattagcaggctgatgtcctgcaccattatgtttactaatcacatgttctgtgtgctgtgacgactgtcaaagagtatctggccatggcggacactca

SEQ ID NO: 553 - DNA, 532 bp, Homo sapiens
  misc_feature (1)..(532): 210915_x_at
aaaggccacactggtgtgcctggccacaggtatcttccctgaccacgtggagctgagctggtgggtgaatgggaaggaggtgcacagtggggtcagcacggacccgcagcccctcaaggagcagcccgccctcaatgactccagatactgcctgagcagccgcctgagggtctcggccaccttctggcagaacccccgcaaccacttccgctgtcaagtccagttctacgggctctcggagaatgacgagtggacccaggatagggccaaacccgtcacccagatcgtcagcgccgaggcctggggtagagcagactgtggctttacctcggtgtcctaccagcaaggggtcctgtctgccaccatcctctatgagatcctgctagggaaggccaccatgtatgctgtgctggtcagcgcccttgtgttgatggccatggtcaagagaaaggatttctgaaggcagccctggaagtggagttaggagcttctaacccgtcatggtttcaatacacattcttcttttgccagc

SEQ ID NO: 554 - DNA, 278 bp, Homo sapiens
  misc_feature (1)..(278): 210999_s_at
aagaacacacatcgattctgcacctggggacccagagcgagatgggtttgttcggtgccagccgaccaagattgactagtttgttggacttaaacgacgatttgctgctgtgaacccagcagggtcgcctccctctgcgtcggccaaattggggagggcatggaagatccagcggaaagttgaaaataaactggaatgatcatcttggcttgggccgcttaggaacaagaaccggagagaagtgattggaaatgaactcttgccctggaataatcttg

SEQ ID NO: 555 - DNA, 541 bp, Homo sapiens
  misc_feature (1)..(541): 211135_x_at
ggacaggggcctgctgaggaggtccagcccagctgctgacgtccaggaagaaaacctctatgctgctgtgaaggacacacagtctgaggacagggtggagctggacagtcagagcccacacgatgaagacccccaggcagtgacgtatgccccggtgaaacactccagtcctaggagagaaatggcctctcctccctcctcactgtctggggaattcctggacacaaaggacagacaggtggaagaggacaggcagatggacactgaggctgctgcatctgaagcctcccaggatgtgacctacgcccagctgcacagcttgacccttagacggaaggcaactgagcctcctccatcccaggaaggggaacctccagctgagcccagcatctacgccactctggccatccactagcccggggggtacgcagaccccacactcagcagaaggagactcaggactgctgaaggcacgggagctgcccccagtggacaccagtgaaccccagtcagcctggacccctaacacagaccatgagga

SEQ ID NO: 556 - DNA, 512 bp, Homo sapiens
  misc_feature (1)..(512): 211144_x_at
aaatgatacactactgctgcagctcacaaacacctctgcatattacatgtacctcctcctgctcctcaagagtgtggtctattttgccatcatcacctgctgtctgcttggaagaacggctttctgctgcaatggagagaaatcataacagacggtggcacaaggaggccatcttttcctcatcggttattgtccctagaagcgtcttctgaggatctagttgggctttctttctgggtttgggccatttcagttctcatgtgtgtactattctatcattattgtataatggttttcaaaccagtgggcacacagagaacctcagtctgtaataacaatgaggaatagccatggcgatctccagcaccaatctctccatgttttccacagctcctccagccaacccaaatagcgcctgctatagtgtagacagcctgcggcttctagccttgtccctctcttagtgttctttaatcagataactgcctggaagcctttcattttacacgccc

SEQ ID NO: 557 - DNA, 498 bp, Homo sapiens
  misc_feature (1)..(498): 211342_x_at
cagcagcagcagcagatcctgcggcagcagcagcaacagcaacagcagcagcagcagcagcagcaacagcaacagcagcagcagcaacagcaacaacagcaacaccagcagcaacagcagcaacaggcggctcctccccaaccccagccccagtcccagccccagttccagcgccaggggcttcagcagacccagcagcagcaacagacagcagctttggtccggcaacttcaacaacagctctctaatacccagccacagcccagtaccaacatatttggacgctactgagccacctggaggaactgcttgtgcactggatgtggccccaccctttcctcttaattcccaatcccattcctgggctagcaccagtagtggttggggccctcccctcaggctccatttttaataagtttttagtatttttgttaatgtgaggcattgagctgttgggttttgtatattatttatatagagaccccagagctgttgcac

SEQ ID NO: 558 - DNA, 370 bp, Homo sapiens
  misc_feature (1)..(370): 211429_s_at
tactggaacctatgatctgaagagcgtcctgggtcaactgggcatcactaaggtcttcagcaatggggctgacctctccggggtcacagaggaggcacccctgaagctctccaaggccgtgcataaggctgtgctgaccatcgacgagaaagggactgaagctgctggggccatgtttttagaggccatacccatgtctatcccccccgaggtcaagttcaacaaaccctttgtcttcttaatgattgaacaaaataccaagtctcccctcttcatgggaaaagtggtgaatcccacccaaaaataactgcctctcgctcctcaacccctcccctccatccctggccccctccctggatgacattaaaga

SEQ ID NO: 559 - DNA, 545 bp, Homo sapiens
  misc_feature (1)..(545): 211458_s_at
aaatagcattaaactggaattgacagagtgagttgagcatctctgtctaacctgctctttctctctggtgctcctcatctcacccctaccttggaatttaataagcttcaggcatttccaattgcagactaaaaccacttctaccatctcctctagtattttccatgtatcaggacagagatgtcttatgtagggaaggggcaggtatgaagtgaggtagattatctatacctctcactcattcaggattctcgctcccatgctgctgtcccttcattctcacactcacaggaatgctatgtgatggccagctgcttcccttcttggttatccactgcagctgctagttagaaaggtttgcagggatgacttttagtaaatcatggggattttattgatttattatcacttataggattttgtggggtgggagtggggagcaggaattgcactcagacatgacatttcaattcatctctgcaaatgaaaagggttcttcctcttgggggaaatctgtgtgtcagttctgtcagctgcaagttctt

SEQ ID NO: 560 - DNA, 478 bp, Homo sapiens
  misc_feature (1)..(478): 211464_x_at
gcctgaccaacatggcagaagccccgcctctactaaaaatgcaaaaaaaaatttagctaggcatggcggcgcatgcctgcaatcccagctacttggaaggctgaggcaggagaatcacttgaacccaggaggtggaggctgcggtgagccgagcattgcgccattgcactccagcctgggcaacgagtgaaactccgtctcaaaaaaaaagaaaatgtctttctcttccttttatataaatatcgttagggtgaagcattatggtctaatgattcaaatgttttaaagtttaatgcctagcagagaactgccttaaaaaaaaaaagttcatgttggccatggtgaaagggtttgatatggagaaacaaaatcctcaggaaattagataaatagaaatttataagcatttgtattattttttaataaactgcagggttacaccaaaatctagctgatttaacttgtattttgtcacttt

SEQ ID NO: 561 - DNA, 216 bp, Homo sapiens
  misc_feature (1)..(216): 211506_s_at
gtgtgaaggtgcagttttgccaaggagtgctaaagaacttagatgtcagtgcataaagacatactccaaacctttccaccccaaatttatcaaagaactgagagtgattgagagtggaccacactgcgccaacacagaaattattgtaaagctttctgatggaagagagctctgtctggaccccaaggaaaactgggtgcagagggttgtggagaa

SEQ ID NO: 562 - DNA, 311 bp, Homo sapiens
  misc_feature (1)..(311): 211546_x_at
gggagttgtggctgctgctgagaaaaccaaacagggtgtggcagaagcagcaggaaagacaaaagagggtgttctctatgtagtggctgagaagaccaaagagcaagtgacaaatgttggaggagcagtggtgacgggtgtgacagcagtagcccagaagacagtggagggagcagggagcattgcagcagccactggctttgtcaaaaaggaccagttgggcaagaatgaagaaggagccccacaggaaggaattctggaagatatgcctgtggatcctgacaatgaggcttatgaaatgccttctgagg

SEQ ID NO: 563 - DNA, 441 bp, Homo sapiens
  misc_feature (1)..(441): 211560_s_at
tccccatccgggtgggcaatgcagcactcaacagcaagctctgtgatctcctgctctccaagcatggcatctatgtgcaggccatcaactacccaactgtcccccggggtgaagagctcctgcgcttggcaccctccccccaccacagccctcagatgatggaagattttgtggagaagctgctgctggcttggactgcggtggggctgcccctccaggatgtgtctgtggctgcctgcaatttctgtcgccgtcctgtacactttgagctcatgagtgagtgggaacgttcctacttcgggaacatggggccccagtatgtcaccacctatgcctgagaagccagctgcctaggattcacaccccacctgcgcttcacttgggtccaggcctactcctgtcttctgctttgttgtgtgcctctagctgaattgagcctaa

SEQ ID NO: 564 - DNA, 561 bp, Homo sapiens
  misc_feature (1)..(561): 211571_s_at
acaagcatcctgtctcacgaagaacaaatgtttgttaatcgtgtgggccatgattatcagtggataggcctcaatgacaagatgtttgagcatgacttccgttggactgatggcagcacactgcaatacgagaattggagacccaaccagccagacagcttcttttctgctggagaagactgtgttgtaatcatttggcatgagaatggccagtggaatgatgttccctgcaattaccatctcacctatacgtgcaagaaaggaacagttgcttgcggccagccccctgttgtagaaaatgccaagacctttggaaagatgaaacctcgttatgaaatcaactccctgattagataccactgcaaagatggtttcattcaacgtcaccttccaactatccggtgcttaggaaatggaagatgggctatacctaaaattacctgcatgaacccatctgcataccaaaggacttattctatgaaatactttaaaaattcctcatcagcaaaggacaattcaataaatacatccaaacatgatcatcgttggagccggaggtgg

SEQ ID NO: 565 - DNA, 496 bp, Homo sapiens
  misc_feature (1)..(496): 211583_x_at
acgccagcatctacgtgtgcagagtggaggtgctgggccttggtgtcgggacagggaatgggactcggctggtggtggagaaagaacatcctcagctaggggctggtacagtcctcctccttcgggctggattctatgctgtcagctttctctctgtggccgtgggcagcaccgtctattaccagggcaaatatgccaaatctactctctccggattcccccaactctgaactttcccttccaccaggtctgacctggaaaggtccaagaaggcagctgccggctgtggtcccagcgcccctcccaccaccatgtgggagctcagcacatctgcttcccccagtcccaggaggctgagcctgattgtcctgagaaatgggaaggatcagatatgactcctccttggcaactgccctttcctgccaggcccacacataccctcttctggctgttaggggagcttgggtccctgaacactgtcattcacccaataaat

SEQ ID NO: 566 - DNA, 335 bp, Homo sapiens
  misc_feature (1)..(335): 211709_s_at
cggtggcacgctcgagaactgcgtggcgcaggcctctgacgacggctcctggtgggaccacgactgccagcggcgtctctactacgtctgcgagttccccttctagcggggccggtaccccgcctccttgcccatcccaccacccggcctttccctgcgccgtgcccaccctcctccggaatcgcccttcccttcctggccacgaatggcagcgtcctccccgacccccagtctgggcgcttctgggagggctcttgcggtgccggcactcctccttgttagtgtctttccttgaaggggcgggcaccaggctaggtccggtgccaataaatcct

SEQ ID NO: 567 - DNA, 491 bp, Homo sapiens
  misc_feature (1)..(491): 211714_x_at
ctgtcttccgtggtcggatgtccatgaaggaggtcgatgagcagatgcttaacgtgcagaacaagaacagcagctactttgtggaatggatccccaacaatgtcaagacagccgtctgtgacatcccacctcgtggcctcaagatggcagtcaccttcattggcaatagcacagccatccaggagctcttcaagcgcatctcggagcagttcactgccatgttccgccggaaggccttcctccactggtacacaggcgagggcatggacgagatggagttcaccgaggctgagagcaacatgaacgacctcgtctctgagtatcagcagtaccaggatgccaccgcagaagaggaggaggatttcggtgaggaggccgaagaggaggcctaaggcagagcccccatcacctcaggcttctcagttcccttagccgtcttactcaactgcccctttcctctccctcagaatttgtgtttgctgcctctatct

SEQ ID NO: 568 - DNA, 552 bp, Homo sapiens
  misc_feature (1)..(552): 211743_s_at
ggctgttgagtctatctcagtgccagatatggtggacaaaaaccttacgtgtcctgaggaagaggacacagtaaaagtggtgggcatccctgggtgccagacctgccgctacctcctggtgagaagtcttcagacgtttagtcaagcttggtttacttgccggaggtgctacaggggcaacctggtttccatccacaacttcaatattaattatcgaatccagtgttctgtcagcgcgctcaaccagggtcaagtctggattggaggcaggatcacaggctcgggtcgctgcagacgctttcagtgggttgacggcagccgctggaactttgcgtactgggctgctcaccagccctggtcccgcggtggtcactgcgtggccctgtgtacccgaggaggctactggcgtcgagcccactgcctcagaagacttcctttcatctgttcctactgagctggtcccagccagcagttcagagctgccctctcctgggcagctgcctcccctcctctgcttgccatccctccctccacctccctgcaataaaatgg

SEQ ID NO: 569 - DNA, 551 bp, Homo sapiens
  misc_feature (1)..(551): 211748_x_at
gaagaaggcggcgttgtccatgtgcaagtctgtggtggcccctgccacggatggtggcctcaacctgacctccaccttcctcaggaaaaaccagtgtgagacccgaaccatgctgctgcagcccgcggggtccctcggctcctacagctaccggagtccccactggggcagcacctactccgtgtcagtggtggagaccgactacgaccagtacgcgctgctgtacagccagggcagcaagggccctggcgaggacttccgcatggccaccctctacagccgaacccagacccccagggctgagttaaaggagaaattcaccgccttctgcaaggcccagggcttcacagaggataccattgtcttcctgccccaaaccgataagtgcatgacggaacaataggactccccagggctgaagctgggatcccggccagccaggtgacccccacgctctggatgtctctgctctgttccttccccgagcccctgccccggctccccgccaaagcacccctgcccactcgggcttcatcctgcacaataaactc

SEQ ID NO: 570 - DNA, 456 bp, Homo sapiens
  misc_feature (1)..(456): 211769_x_at
tggactgtttgtctttgttctctgcctcttgtattctagcatccgcacttccactaatagccaagtagacaagctgaccctgtcagggagtgacagcgtcatccttggtgatacaactaccagtggtgccagtgatgaagaagatggacagcctcggcgggctgtggacaacgagaaagagggagtgcagtatagctactccttattccacctcatgctctgcttggcttccttgtacatcatgatgaccctgaccagctggtacagccctgatgcaaagtttcagagcatgaccagcaagtggccagctgtgtgggtcaagatcagctccagctgggtctgcctcctgctttacgtctggacccttgtggctccacttgtcctcaccagtcgggacttcagctgaacctctgagtgccaaggacaccactggaactcacaaaggtctccttcacc

SEQ ID NO: 571 - DNA, 214 bp, Homo sapiens
  misc_feature (1)..(214): 211820_x_at
aatctttgtattactattgtcaggagaaagggtacaacttgcccatcatttctctgaaccagagataacactcattatttttggggtgatggctggtgttattggaacgatcctcttaatttcttacggtattcgccgactgataaagaaaagcccatctgatgtaaaacctctcccctcacctgacacagacgtgcctttaagttctgttgaa

SEQ ID NO: 572 - DNA, 272 bp, Homo sapiens
  misc_feature (1)..(272): 211821_x_at
gagcatatcagcattaagtaccactgaggtggcaatgcacacttcaacctcttcttcagtcacaaagagttacatctcatcacagacaaatggagaaagggtacaacttgcccatcatttctctgaaccagagataacactcattatttttggggtgatggctggtgttattggaacgatcctcttaatttcttacggtattcgccgactgataaagaaaagcccatctgatgtaaaacctctcccctcacctgacacagacgtgcctttaa

SEQ ID NO: 573 - DNA, 578 bp, Homo sapiens
  misc_feature (1)..(578): 211840_s_at
agatctgagcaacccaacaaagcctctccagctgtaccgccagtggacggaccggataatggaggagttcttccgccaaggagaccgagagagggaacgtggcatggagataagccccatgtgtgacaagcacaatgcttccgtggaaaaatcacaggtgggcttcatagactatattgttcatcccctctgggagacatgggcagacctcgtccaccctgacgcccaggatattttggacactttggaggacaatcgtgaatggtaccagagcacaatccctcagagcccctctcctgcacctgatgacccagaggagggccggcagggtcaaactgagaaattccagtttgaactaactttagaggaagatggtgagtcagacacggaaaaggacagtggcagtcaagtggaagaagacactagctgcagtgactccaagactcttcgtactcaagactcagagtctactgaaattccccttgatgaacaggttgaagaggaggcagtaggggaagaagaggaaagccaacctgaagcctgtgtcatagatgatcgttctcctgacacgtaacagt

SEQ ID NO: 574 - DNA, 436 bp, Homo sapiens
  misc_feature (1)..(436): 211841_s_at
agtgagaagatctgcaccgtccagttggtgggtaacagctggacccctggctaccccgagacccaggaggcgctctgcccgcaggtgacatggtcctgggaccagttgcccagcagagctcttggccccgctgctgcgcccacactctcgccagagtccccagccggctcgccagccatgatgctgcagccgggcccgcagctctacgacgtgatggacgcggtcccagcgcggcgctggaaggagttcgtgcgcacgctggggctgcgcgaggcagagatcgaagccgtggaggtggagatcggccgcttccgagaccagcagtacgagatgctcaagcgctggcgccagcagcagcccgcgggcctcggagccgtttacgcggccctggagcgcatggggctggacggctgcgtggaagacttgcgcagccgcc

SEQ ID NO: 575 - DNA, 595 bp, Homo sapiens
  misc_feature (1)..(595): 211919_s_at
gtggtctatgttggcgtctggatccctgccctcctgctgactattcccgacttcatctttgccaacgtcagtgaggcagatgacagatatatctgtgaccgcttctaccccaatgacttgtgggtggttgtgttccagtttcagcacatcatggttggccttatcctgcctggtattgtcatcctgtcctgctattgcattatcatctccaagctgtcacactccaagggccaccagaagcgcaaggccctcaagaccacaatcatccccatcctggctttcttcgcctgttggctgccttactacattgggatcagcatcgactccttcatcctcctggaaatcatcaagcaagggtgtgagtttgagaacactgtgcacaagtggatttccatcaccgaggccctagctttcttccactgttgtctgaaccccatcctctatgctttccttggagccaaatttaaaacctctgcccagcacgcactcacctctgtgagcagagggtccagcctcaagatcctctccaaaggaaagcgaggtggacattcatctgtttccactgagtctgagtcttcaagttttcactccagct

SEQ ID NO: 576 - DNA, 557 bp, Homo sapiens
  misc_feature (1)..(557): 211922_s_at
ggttgaacagatagccttcgacccaagcaacatgccacctggcattgaggccagtcctgacaaaatgcttcagggccgcctttttgcctatcctgacactcaccgccatcgcctgggacccaattatcttcatatacctgtgaactgtccctaccgtgctcgagtggccaactaccagcgtgacggcccgatgtgcatgcaggacaatcagggtggtgctccaaattactaccccaacagctttggtgctccggaacaacagccttctgccctggagcacagcatccaatattctggagaagtgcggagattcaacactgccaatgatgataacgttactcaggtgcgggcattctatgtgaacgtgctgaatgaggaacagaggaaacgtctgtgtgagaacattgccggccacctgaaggatgcacaaattttcatccagaagaaagcggtcaagaacttcactgaggtccaccctgactacgggagccacatccaggctcttctggacaagtacaatgctgagaagcctaagaatgcgattcacacctttgtgc

SEQ ID NO: 577 - DNA, 160 bp, Homo sapiens
  misc_feature (1)..(160): 211924_s_at
gcactcacgaaccgaaaaaccaaagctatatggtaagaggctgtgcaaccgcctcaatgtgccaacatgcccacctgggtgacgccttcagcatgaaccacattgatgtctcctgctgtactaaaagtggctgtaaccacccagacctggatgtccagta

SEQ ID NO: 578 - DNA, 439 bp, Homo sapiens
  misc_feature (1)..(439): 211941_s_at
  misc_feature (270)..(270): n is a, c, g, or t
cacagtcctctccgattatgtgggctcggggcctcccaagggcacaggcctccaccgctatgtctggctggtttacgagcaggacaggccgctaaagtgtgacgagcccatcctcagcaaccgatctggagaccaccgtggcaaattcaaggtggcgtccttccgtaaaaagtatgagctcagggccccggtggctggcacgtgttaccaggccgagtgggatgactatgtgcccaaactgtacgagcagctgtctgggaagtagggggnttagcttggggacctgaactgtcctggaggccccaagccatgttccccagttcagtgttgcatgtataatagatttctcctcttcctgccccccttggcatgggtgagacctgaccagtcagatggtagttgagggtgacttttcctgctgcctggcctttataatttt

SEQ ID NO: 579 - DNA, 374 bp, Homo sapiens
  misc_feature (1)..(374): 211948_x_at
  misc_feature (285)..(285): n is a, c, g, or t
taaatcatcttcccaaatacctgcccaaccatcagtagcaaaagttccctatgggaaaggaccttcatttaatcaggaacgtggaacatcttcacatctgccaccacctccaaagttgcttgcacagcagcatccacctccagatcgacaggcagtacctggaagaccaggcccctttccctccaagcagcaagtagctgatgaagatgaaatatggaagcaaagacgaagacaacaatcagaaatttctgcagcagtagaacgtgctcgtaaacggcgtgaagnggaagagcgaagaatggaagaacaaaggaaggcagcttgtgcggagaaactgaaacgattggatgagaagcttggcatcctggaaaaac

SEQ ID NO: 580 - DNA, 538 bp, Homo sapiens
  misc_feature (1)..(538): 211962_s_at
  misc_feature (33)..(33): n is a, c, g, or t
gctttaatggtttttgctctagaataccgtagntctatccttagagcactcacgccatgctttcttccctgggttttaaacttcatataactttcagaaattggagagcaaaaattttgcttgtcactgcacatcaatataaaaaagcttatttaacttatcaaaacgtatttattgccaaactatgcttttttttgttaattttgttcatatttatcgggatgacaaatccatagaatatattcttttatgttaaattatgatcttcatattaatcttaaaattttgtgacgtgtctttttcctttttttccacagttttaatatattattcttcaacgacattttttgtaactttacacttttttggttattttattttaaaaaaatgaaaaattaatttaaaaaaatgcaaaaaactgttggattatttattttagaaattcccccctttgtgttggactgcaaattgagtttctttctctttaggcctttcacaactaggactgagaatgtatgtaaaagttctgtgacagtac

SEQ ID NO: 581 - DNA, 318 bp, Homo sapiens
  misc_feature (1)..(318): 211984_at
tgaacggctgtgcagtaggcccagcgctgctgtgtctcgtcagaggaatagcttaccacgaacccctcagcatactgggaatctcttcctgaacaacgaatgtaaatttggtcaagtctactcttccgttcattcaattattttaagcatttgaattatttattgtatatcctaaatatatttctcctttggcagtgactagatttccactaatgtgtcttaatctatccctccagctggcagttactgtttttttaatcccctgaagttgtcctgtaggagacagaaattctttgctgtctgtatcccttggagtaa

SEQ ID NO: 582 - DNA, 135 bp, Homo sapiens
  misc_feature (1)..(135): 211985_s_at
gaggcaaatggatctcgatatttcagatgggcttttgatgcactgttgccaaggaaggctttttctgattttttgacaaatgaatttttgcacactttcattggtgtctttcggcaacttacacacattgaaaat

SEQ ID NO: 583 - DNA, 468 bp, Homo sapiens
  misc_feature (1)..(468): 212055_at
tagccaggctcgtagtgaggcctccagagcaggttgtgctgtcccctgcctctggaagcaatggggaatttggaatcttgtgtaagtgcccaaataagtctgagtgctttcctcttcttcaacactcaaccctcaatcccttagcactgattgattagagaggtcccccaaagaaaccactggttttgacccatgaagcattagaactgcattgttcattcaggagccactagtcacatatgactatttaaatttaaagtaaattgtatgaaaaattcatttcttcaattgcattagccacattttgagtattcatgtggctggtagattctgtattagcacaaagatatggaacatttccatcaccacagaaagttctgttggacagcactgcattagaatattttcatactgctcttcctcaattaatttttgttgttaatgttgatgtcttcattggatgggtca

SEQ ID NO: 584 - DNA, 509 bp, Homo sapiens
  misc_feature (1)..(509): 212099_at
  misc_feature (389)..(389): n is a, c, g, or t
  misc_feature (390)..(390): n is a, c, g, or t
gtggggttgtttttgccataagcgaactttgtgcctgtcctagaagtgaaaattgttcagtccaagaaactgatgttatttgatttatttaaaggctaaaatttgtttttttattctttgcacaattgtttcattgtttgacacttaatgcactcgtcatttgcatacgacagtagcattctgaccacacttgtacgctgtaacctcatctacttctgatgtttttaaaaaatgacttttaacaaggagagggaaaagaaacccactaaattttgctttgtttccttgaagaatgtggcaacactgttttgtgattttatttgtgcaggtcatgcacacagttttgataaagggcagtaacaagtattggggcctattttttttttttnnccacaaggcattctctaaagctatgtgaaattttctctgcacctctgtacagagaatacacctgcccctgtatatccttttttcccctcccctccctcccagtggtacttctactaaat

SEQ ID NO: 585 - DNA, 494 bp, Homo sapiens
  misc_feature (1)..(494): 212115_at
cccttgcagtccgctaggtgagaggaaaagctctttacttccgcccctggcagggacttctgggttatgggagaaaccagagatgggaatgaggaaaatatgaactacagcagaagcccctgggcagctgtgatggagcccctgacattactcttcttgcatctgtcctgccttctttccctctgcgaggcagtggggtgggattcagagtgcttagtctgctcactgggagaagaagagttcctgcgcatgcaagccctgctgtgtggctgtcgtttacatttgggaggtgtcctgtatgtctgtacgttggggactgcctgtatttggaagatttaaaaacctagcatcctgttctcaccctctaagctgcattgagaaatgactcgtctctgtatttgtattaagccttaacacttttcttaagtgcattcggtgccaacattttttagagctgtaccaaaacaaaaagcctgtactcacatcacaatgtc

SEQ ID NO: 586 - DNA, 519 bp, Homo sapiens
  misc_feature (1)..(519): 212141_at
  misc_feature (363)..(363): n is a, c, g, or t
gtagccggggaatggtttctgcataccctcgacagctagagtcattaatccgcttagcagaagcccatgctaaagtaagattgtctaacaaagttgaagccattgatgtggaagaggccaaacgcctccatcgggaagctctgaagcagtctgcaactgatccccggactggcatcgtggacatatctattcttactacggggatgagtgccacctctcgtaaacggaaagaagaattagctgaagcattgaaaaagcttattttatctaagggcaaaacaccagctctaaaataccagcaactttttgaagatattcggggacaatctgacatagcaattactaaagatatgtttgaagaangcactgcgtgccctggcagatgatgatttcctgacagtgactgggaagaccgtgcgcttgctctgaagccttgtgagcaaggaaggctccctgcatgtcctgcttgctgcacgccacatgggtgtggtctgcatctcagttggccgccatcagtgt

SEQ ID NO: 587 - DNA, 493 bp, Homo sapiens
  misc_feature (1)..(493): 212175_s_at
  misc_feature (313)..(313): n is a, c, g, or t
aagccagtgctctaagacctcagcttttatctcagaaccccatgggttccagaccaagagtacaggaaatcaaattgttgtcctgtctgtctatagcttggaacagggagctttgattactgactccggttccacacactgtaagatcaaaaaaccatctccacatttgaaagagatgtaaggtgtattcatagggatggtggctcaacaaatcaagcaaactggaatcaaggggagggggaagggaatgaaatggaaagggaggctgattcccttcccctgacttaccactaatttactaggctacctactntcatgagtaacctctcacagctacccagcacatgccacaatcctatgctcttgccttcttttatctgcactgtgtgaagggactcttttaaataaatgagcaagtgtcctaagctatgtcatccaaagattgtcctttccattctcaaatcctgtgactgggatcactcaacagcactgt

SEQ ID NO: 588 - DNA, 428 bp, Homo sapiens
  misc_feature (1)..(428): 212187_x_at
  misc_feature (372)..(372): n is a, c, g, or t
  misc_feature (384)..(384): n is a, c, g, or t
  misc_feature (385)..(385): n is a, c, g, or t
ccatgtgcaagtctgtggtggcccctgccacggatggtggcctcaacctgacctccaccttcctcaggaaaaaccagtgtgagacccgaaccatgctgctgcagcccgcggggtccctcggctcctacagctaccggagtccccactggggcagcacctactccgtgtcagtggtggagaccgactacgaccagtacgcgctgctgtacagccagggcagcaagggccctggcgaggacttccgcatggccaccctctacagccgaacccagacccccagggctgagttaaaggagaaattcaccgccttctgcaaggcccagggcttcacagaggataccattgtcttcctgccccaaaccgataagtgcntgacggaacaannataagtgcatgacggaacaataggactccccagggctgaagct

SEQ ID NO: 589 - DNA, 546 bp, Homo sapiens
  misc_feature (1)..(546): 212195_at
gatgggtcgtgtgatgagatgcatttaaggccgatagtgatagatgttttttttatttcttgaacacaggctttgtctgaatgatgttcttttatctcttgaacacaagctttgaatgataactacaggttttaagtgctgttacattaataccataatgtgatgtgttagaaacaaagggatatttcaaaggtagatatttgaaaattctctagtctcaatatgtatgtgtattgaatatactctaaaaataaatgtgcaatttgctagtaggacaatgcagtgactgactagcattaggtatgtttcttttatatcctagctatgtcccactttcttctaagtgcaatcctttcatgttcacttgctgttttaccccatctactctaacttcatttggaaggcttgtctagagtatagcatgtatttttacctttgcagtgaattgcatgtgctaattgtaaccacagctatttttatgttgacataactccaaatgttatattaaatgttctattatatattagctctaatcccttaagtaaa

SEQ ID NO: 590 - DNA, 585 bp, Homo sapiens
  misc_feature (1)..(585): 212196_at
ttgcatgttgaagcctgtataaaacatggtacagtgagtgaatatacccccatccccaagaacactttatacatattaaatggatatatgattactgtgcaaaaattcattctggaaatgaacatatatttgagcactaatatgtaatgtacacctgccctaaggagaaaataaattataaaactttttacattcaaaattactttcccaagcatgtcttagaataatctatgtgttgatgcatgtaaattgtactttaggtaggcaaagaaatctggttatttatgtaaaaactagtctaataaagttagttagtggctttatcactttaaatctttagtgtccaaaagtggtgtttaaagtaatagcacatcagaaaaccttgtctggacaaaactagttcactcactgcttctgcacctgcagttgctccctttagggttataaaataatgacccaaatgttacatgtgttgatattataacttgtcagttactgatgtctgtggtatcctaccctcatctctgaaagggataatactgaataattattagaaaactataaaacttcacactttgtaccatt

SEQ ID NO: 591 - DNA, 392 bp, Homo sapiens
  misc_feature (1)..(392): 212231_at
ggatttgaacctgcatctggaaacgtaaccactcacagcacctggcccgccaaggttgggaggattgtacactactttcatttaaaggggaaagtttgataatacggaattaattaatatgaatgagatgcattaataagaacctgagcatgctgagagttgcaattgttggttttctggtttgattgatttccttttttcttagacacatcaaagtcaagaaagatggttttacctttactgacccagctgtacatatgtatctagactgtttttaaatgtctttcttcatgaatgcttcatggggctccaggaagcctgtatcacctgtgtaagttggtatttgggcactttatatttttctaaaaacgtgttttggatcctgtactcta

SEQ ID NO: 592 - DNA, 531 bp, Homo sapiens
  misc_feature (1)..(531): 212235_at
atcctggccacagacagtttcaagtagtgtcagatttttgttgcttgggcggctgttggtagagtgggcagtgcccgcgccatggggtgctctgtgggcttctccaggagcagggagggtggaggggagggatggggggcacaggagctgggagccccgtctccaggaaaaggagaggggttaagatgcaccgaggctgtagctgggctacttgatcttgctgaaagtgtttctaaagatagcaccacttttttttttaaagcttttatatattaaaaaacgtatcatgcaccaactgtgaatagctgccgcttgcgcagaggacccggggaggggtcccgagaggctccccatgcaacactggaaatgactgttccagagagcgggcagacctggcagagcgcccctggcgcctgagactaccacccactccgttcctgccagaaacgaccctctgtggccgatgggccatgcgggcccctcgcagccaactcagccagtgttgggactggctcagagcccatgggggct

SEQ ID NO: 593 - DNA, 359 bp, Homo sapiens
  misc_feature (1)..(359): 212268_at
cctgctgccggatgacattgaggacgagtccacgggcctgaagaagattgaggaacagttgactttggaaaagttgcatgagtggactaaacctgagaatctcgatttcattgaagttaatgtcagcttgcccaggttcaaactggaagagagttacactctcaactccgacctcgcccgcctaggtgtgcaggatctctttaacagtagcaaggctgatctgtctggcatgtcaggagccagagatatttttatatcaaaaattgtccacaagtcatttgtggaagtgaatgaagagggaacagaggcggcagctgccacagcaggcatcgcaactttctgcatgttgatgcccgaag

SEQ ID NO: 594 - DNA, 442 bp, Homo sapiens
  misc_feature (1)..(442): 212296_at
  misc_feature (251)..(251): n is a, c, g, or t
aggtttgacacttcaggactacagtgaacattgtaaacacaatgaatcagtggtaaaagagatgttggaattagccaagaattacaataaggctgtagaagaagaagataagatgacacctgaacagctggcaataaagaatgttggcaagcaggaccccaaacgtcatttggaggaacatgtggatgtacttatgacctcaaatattgtccagtgtttagcagctatgttggatactgtcgtatttaaantaaagcaacgaaaaacgctattaatgatgccttcagtgtatattcctctgttgttcctaatgctcaaaatcaagggacctctgaaggtgtacttggctaaatgtaagacatctggcatcatttgcagcactgtaacaccttcagtctcagttgtgcaattacttctgtttctttagtcagggtctttgcag

SEQ ID NO: 595 - DNA, 474 bp, Homo sapiens
  misc_feature (1)..(474): 212320_at
  misc_feature (112)..(112): n is a, c, g, or t
  misc_feature (113)..(113): n is a, c, g, or t
  misc_feature (178)..(178): n is a, c, g, or t
  misc_feature (325)..(325): n is a, c, g, or t
tccaggctattaaagtcactaaatttctaagtatgtccatttcccatctcagcttcaagggaggtgtcagcagtattatctccactttcaatctccctccaagctctactcnntggaggagtctgtcccactctgtcaagtggaatccttccctttccaactctacctccctcactcnagctcctttcccctgatcagagaaagggatcaagggggttgggaggggggaaagagaccagccttggtccctaagcctccagaaacgtcttcttaatccccaccttttcttactcccaaaaaagaatgaacacccctgactctggantggtgtatactgccacatcagtgtttgagtcagtccccagaggagaggggaaccctcctccatcttttttgcaacatctcatttcttccttttgctgttgcttcccccctcacacacttggttttgttctatcctacatttgagatttc

SEQ ID NO: 596 - DNA, 472 bp, Homo sapiens
  misc_feature (1)..(472): 212358_at
caagtccccaggaaacccaatcatgaggtccttgtgcctggtatggaggagactgcagtcaggatatgcattccaggctcccagacacctcaagccctattcacaggcaccaggaaaccccacacaggaattcccatccctggaaactggagaatttcaatgccccgagtccatgggtttcaagacaccaaattccaagagccccagccctaagggaaccccaaatcctaaagcctccatctctaataaatggaaggccccaaggccctgaggggatctcaaatcctggaaccccgatttcaatctacgttctagtcactggcctcaaaggaccccacagcacctgggccagaccaacagctcgagggagaacctgaaggcccagggggtccagggcggacctggggccccgaccaccaaggacagctcacgactgccccttcactgcatgtccccaaactcagcatgactc

SEQ ID NO: 597 - DNA, 494 bp, Homo sapiens
  misc_feature (1)..(494): 212400_at
  misc_feature (41)..(41): n is a, c, g, or t
aaaggaagctgaccgcacagtgtccagacgaattggccccnagaagatggggagttctgtcctgcccttctgtgtctgcgtgacctcacccagcctaggagggaggtgcattcagggtagatttgcctctcattcaaagttctggggctttgggcggaaaacagccagctttggcgctgttggggagactcctccagaccaggaaccccagaaggagacagagcctgccacatcctcccacgccaggccctgggccagggtgattggactgagaatttggccacaaccaaattgatgctggctggaaccagaggccagaaagcctggccttgtccccatgtgggagccctgtcctcagccctcttgtccccttgagctcagtgaattcccaccaggtgcccacagctcctggacttcaaattctatatattgagagagttggagagtatatcagagatatttttggaaaggagttggtctatgcaatgtcagtt

SEQ ID NO: 598 - DNA, 467 bp, Homo sapiens
  misc_feature (1)..(467): 212402_at
gagacactagttttggccaacttaagattttacgttaatttttacatagtatttgacactcatgcaaaataatgtgaaaacatctagatttagtagtttattctgcgccttttgttaaaactgaagattttggaaaatggttgtcactgctcttccagcctatgaatatttttgtgaaatggaaccatggatttatgtctggatcatccatacagaaccaacaattttattcaaaaacaatgtgttcatcaaagtaattgctcacattgtgcagtactatgttgtacagaccacgtgaaagggaatgctggtctagctggcgtggtatgtttataggcgaatttcagcagaaggaagccaaaatagttttttccttttgaaagttttttaaaaattatttcatgggtcttttttttaattaatatgtgtgcattgttacaatgtatgttggatgtcttttgacccta

SEQ ID NO: 599 - DNA, 369 bp, Homo sapiens
  misc_feature (1)..(369): 212501_at
cgccggcaaaactttggcactggggcacttggcagcgcggggagcccgtcggtaattttaatattttattatatatatatatctatatttttgtccaaaccaaccgcacatgcagatggggctcccgcccgtggtgttatttaaagaagaaacgtctatgtgtacagatgaatgataaactctctgcttctccctctgcccctctccaggcgccggcgggcgggccggtttcgaagttgatgcaatcggtttaaacatggctgaacgcgtgtgtacacgggactgacgcaacccacgtgtaactgtcagccgggccctgagtaatcgcttaaagatgttcctacgggcttgttgctgttgatgttttgt

SEQ ID NO: 600 - DNA, 373 bp, Homo sapiens
  misc_feature (1)..(373): 212508_at
gcctcatccctgtgaatttcttattgtacacaagttctttcactatctgtgtgcagtgctctgaggggacagacaaggcttgggtgtatatgccaaccagatctcattgaagtatcagcttgtttggtactaggtgcaagtgtagcatgtcacatgtgaccatgttggatcattgacaatttttaggtatgtactgacctacatttatgatgaagatcctgagcggaggttaagatattaagttattttccatatgaatcagaattatattgattctgtgcaatcaaaacaaaaggcagaatagaatgctgagattggttaagtttgcaatgaccatcttgaaccacagatttctgctatgtgtcatcaaaac

SEQ ID NO: 601 - DNA, 557 bp, Homo sapiens
  misc_feature (1)..(557): 212526_at
gtggaattcctcacagattaaccagtattttttaaatgtattcattcctacaaattaactttcataaattttatggcatgtcttctatttaaaaggaaaagaataagtattcttgcatctggccttagaaatgtgaagttatattctcaagtttatttttttccaagtgtagctaaaatatttttgcaggtaaaataaagctgatagtacatgtgttgttcaaaccttgttaaacctaatattgaactatttttatatctgctgtctttcagaaggcaaataggaaactatatatttgcttaaaaattggcatttagtaaccttaattctttttatagaaggaatgacttaaagtattgtcccctctttttgcactaattgtggatttttttagatgcttctcaaaattttcagtgtgtaagctaaacaaaaactaaaactaagaattctcaaaaaaacttgttcaaaacagggaaagactgatgaaaagtaaaatggactacttttgtaacttacctgtttgttaggaaatggaatggtctctttgatttaaaatg

SEQ ID NO: 602 - DNA, 382 bp, Homo sapiens
  misc_feature (1)..(382): 212530_at
  misc_feature (57)..(57): n is a, c, g, or t
aagctatatctattctaaaccttatttagacattggtaccagttacccaggtgaaanatatggagtaactttgttttgtatggtaaggtttaggaatggtggatgaagggtatctctatataaataaagtgctcaacaatgtgcaatgattgtaaatttagtaagatattacagccatttcatgaatgctttaccattcaacatagtatctattacaaaacacctttcttgtatccatatacttcaggtgttgctgttaacatttactatgatatttattttaaccaaaatgttactcacattaaatgtttattctttaaaatgaatgtattatgtttttaacccacaaatgcatacttaccctgtgcctcatatttcaata

SEQ ID NO: 603 - DNA, 498 bp, Homo sapiens
  misc_feature (1)..(498): 212588_at
tcctccttgttctactcatatatatctatcttatatagtttactattttacttctagagatagtacataaaggtggtatgtgtgtgtatgctactacaaaaaagttgttaactaaattaacattgggaaatcttatattccatatattagcatttagtccaatgtctttttaagcttatttaattaaaaaatttccagtgagcttatcatgctgtctttacatggggttttcaattttgcatgctcgattattccctgtacaatatttaaaatttattgcttgatacttttgacaacaaattaggttttgtacaattgaacttaaataaatgtcattaaaataaataaatgcaatatgtattaatattcattgtataaaaatagaagaatacaaacatatttgttaaatatttacatatgaaatttaatatagctatttttatggaatttttcattgatatgaaaaatatgatattgcatatgcatagttcccatgtt

SEQ ID NO: 604 - DNA, 462 bp, Homo sapiens
  misc_feature (1)..(462): 212657_s_at
  misc_feature (304)..(304): n is a, c, g, or t
ggtactatgttagccccataattttttttttccttttaaaacacttccataatctggactcctctgtccaggcactgctgcccagcctccaagctccatctccactccagattttttacagctgcctgcagtactttacctcctatcagaagtttctcagctcccaaggctctgagcaaatgtggctcctgggggttctttcttcctctgctgaaggaataaattgctccttgacattgtagagcttctggcacttggagacttgtatgaaagatggctgtgcctctgcctgtctcccccaccnggctgggagctctgcagagcaggaaacatgactcgtatatgtctcaggtccctgcagggccaagcacctagcctcgctcttggcaggtactcagcgaatgaatgctgtatatgttgggtgcaaagttccctacttcctgtgacttcagctctgtttta

SEQ ID NO: 605 - DNA, 502 bp, Homo sapiens
  misc_feature (1)..(502): 212697_at
agagctcaagccaaacgcttctgtcctctttccttctgcattaaccctttgctgatcctcaggggccactcccccaacacccctgtacttgggtgagggatgttggacagagcctgttttcatgtactgcaggtgggggtgtgctgacatgtttgctcttggttgatggagaaggtacagaggccagggagtgaaaatggttgacagaagagggaagagttaggtgtctcatagtcactcatagtggggtggtcaggggtaatggcatctccccactttaggcttctcaaacagacttttgacacctctcaagttcagagctctgatgtggaaagacaggaggtgtggggaaggagggggatttcgtgtgtttgcatgagtgtgcgcttcaggccttgggagttggcaagagggagggaaggaaggagagcaaaatcttcggaaggtgtttcttgtacctgagggatcctgccctgaatctccatagtctccactgtgaact

SEQ ID NO: 606 - DNA, 255 bp, Homo sapiens
  misc_feature (1)..(255): 212749_s_at
ggacgtagaatttcactggatcagcaatgacgagcctacacagtactggagaacttggcattttctgatatagaaaaaggctttccttggtatcgtgttatcatgtgtcgtcatctatgcattagagttgatgtgttttgtactagtgtcacagcataaaatcatattacaagtacgtaaggattcagggtctcttgatagacttatcatagctctatattgaatgaaagccactgtgcttgtgttttgattgga

SEQ ID NO: 607 - DNA, 526 bp, Homo sapiens
  misc_feature (1)..(526): 212754_s_at
  misc_feature (144)..(144): n is a, c, g, or t
ttaaggatttcatgcagccaccagcatccagagttcaaaatggagaatcttgaccggctacaatatatttgaaagcaggaagatagtctaaaaaatgtttgctcctaattgagtcttctgtgagaaggacatttcttactgcanataattcttggcagctgttgttggcctcctttaaattctacttacctgagttcagtaattcatattacaggcttgcacatcaacaaaggctcctgaatgaacagcagtgtaaggctttaataaattaaactgatgggagggataattaacactacagtatacatgctaccatatctccagttggtgatttaaagtgagcttatgtacagtttgtggtgtatgtgttaatgatgtactttttaaaaagaaagaagagatatttcaattcagtcagatttattagtctggtgtttttgcaccctttttcaagtacaaaatcgtactagaattttatgcaagatggtactgtaacattccatattatctataaccagcctttgtt

SEQ ID NO: 608 - DNA, 279 bp, Homo sapiens
  misc_feature (1)..(279): 212769_at
agcagggctgtcaaactctgggagaaaccgactcggctctgacagggagacccccaggcgaggggccccgaggatggcggaggatgggccgcaggcagccgagcgttcagggctgcgctccggccggctgagagggcacgtgccccgtcacagtctggactcctgggcctggattgatgtgtctcacagactcggaagggttctgctcctcctcctccccctgaacaatgctggcagttgctacaaatagatttattggaggcttatggctccggttcc

SEQ ID NO: 609 - DNA, 549 bp, Homo sapiens
  misc_feature (1)..(549): 212841_s_at
  misc_feature (225)..(225): n is a, c, g, or t
ggatgggctggaccaggtgggacagattagctgatgcccttgtcacctgccctctgtgcaccctgagagctcacagtaacactgtgtgtgtcaccatataactgcacctcacccccgcacgtgtgcatgactcgcagagaatattccagcaattgtgtacccctgggccagtctctttgaaccctgagggtggccaggatctggagctgcatctctaaggggccnaggctttggggaccattgccaaaggtggactcaggaggaaagacacttaaagacacttttacatgtctagtaattcttgatgttcatcttcagcaccagtggaaacacatgaacttcgatgcaggtccagagaccatggacactcccacgaggctcagctctcaggcaccccctacacttcagttgagggaaaagctcaagtgccttaggcccgtggaccacagtcttggctgagatcaaagggatgagcaacagggacttctgccacagtgacaatggaattgtgttgtgccttacttcagaggtggtctcttctttcttgta

SEQ ID NO: 610 - DNA, 351 bp, Homo sapiens
  misc_feature (1)..(351): 212914_at
ccccacccgctttgaatgtagagacccgtgggcacttttccttttgtggtggggggtgcggaggaggtacccccacccctggcacagccgcctggaatgcaggactgtcactgctgttcgggtgatgacctcgttgccaagctcctcctgtccccttgttctgggggcaggcgctgtgcttctgtgaggtggtttagcttttgctttcgaagtggccagctgcggccaccaggtctcagcacaagagcgcttcctttgcacagaatgagcttcgagctttgttcagactaaatgaatgtatctgggaggggtcgggggcacgagttgattccaagcacatgcctttgctga

SEQ ID NO: 611 - DNA, 425 bp, Homo sapiens
  misc_feature (1)..(425): 212998_x_at
  misc_feature (46)..(46): n is a, c, g, or t
  misc_feature (78)..(78): n is a, c, g, or t
  misc_feature (84)..(84): n is a, c, g, or t
  misc_feature (93)..(93): n is a, c, g, or t
  misc_feature (98)..(98): n is a, c, g, or t
  misc_feature (102)..(102): n is a, c, g, or t
  misc_feature (120)..(120): n is a, c, g, or t
  misc_feature (150)..(150): n is a, c, g, or t
  misc_feature (166)..(166): n is a, c, g, or t
  misc_feature (173)..(173): n is a, c, g, or t
  misc_feature (175)..(175): n is a, c, g, or t
  misc_feature (186)..(186): n is a, c, g, or t
  misc_feature (219)..(219): n is a, c, g, or t
  misc_feature (236)..(236): n is a, c, g, or t
  misc_feature (297)..(297): n is a, c, g, or t
  misc_feature (299)..(299): n is a, c, g, or t
  misc_feature (310)..(310): n is a, c, g, or t
  misc_feature (348)..(348): n is a, c, g, or t
  misc_feature (366)..(366): n is a, c, g, or t
  misc_feature (370)..(370): n is a, c, g, or t
  misc_feature (396)..(396): n is a, c, g, or t
tggcgggctcagtctgaatctgcccagagcaagatgctgagtggcnttggaggcttcgtgctggggctgatcttcctngggctnggccttatnatccntcanaggagtcagaaagggctnctgcactgactcctgagactattttaactnggattggttatcactnttctgtnangcctgcttgtncctgcccagaattcccagctgcctgtgtcagcntgtccccctgagatcanagtcctacagtggctgtcacgcagccaccaggtcatctcctttcatccccaccccaaggcngntggctgtgacnctgcttcctgcactgacccagagcctctgcctgtgcanggccagctgcgtctactnaggncccaaggggtttctgtttctattctntcctcagactgctcaagagaagcacatga

SEQ ID NO: 612 - DNA, 507 bp, Homo sapiens
  misc_feature (1)..(507): 213110_s_at
atattcctacatcaagttactactgagagtaaatttattttgagttttatcccgtaagttctgttttgattttttttaaaaaacaaacccttttagtcactttaatcagaattttaaatgttcatgttacataccaaattataatatctaatggagcaatttgtcttttgctatattctccaagattatctcttaagaccatatgccccctgttttaatgtttcttacatcttgtttttactcatttctgactggacaaagttcttccaaacaattctgagaaacaaaaacacacacgcagaattaacaattcttttccctgtgcttcttatgtaagaatcctcctgtggcctctgcttgtacagaactgggaaacaacacttggttagtctcttttaagttacaaaaagccaattgatgtttcttattctttttaaattttaaatattttgttataaatactcacaggataccttatttccctagctatcatctcctgacttaatg

SEQ ID NO: 613 - DNA, 522 bp, Homo sapiens
  misc_feature (1)..(522): 213115_at
gttcttcaccctttcagatgtgacctcttttggactaagcagcaatctgttctcttgctcaaataataaagtgactgaatcagggaggaaaaggttcttgttaaattatttgattgtgtagttgaagtaattataatttatatcaaaacgtttgtcaaagaaacgatgtcaaatatacacttcttgatctcccttctgtttgcggggatcttactatttgatgggtcactgtccccattcttactgatacttttgtcagatatcaccctgtccttaaatcatgatcacttaaatcaggggtcagcaaactttttctgtaaagggccagacgggaaatattttgggctttgcaggccatgcggcctctgtcacatctactcaactctgctgttgacatgcaaaagcagcaatagacaatatgcgtgtaaatgagtgtggctgtaatccaagaaaactttatttacaaaagcaggtggagggctgggtttggcctgcaggctgtagcttgccaatcagtgactt

SEQ ID NO: 614 - DNA, 341 bp, Homo sapiens
  misc_feature (1)..(341): 213135_at
gttcagtacatcatgctcttgtgcctctgcctgcttttcctgcgttcccaccctgtattccccccgcctttcgggtttccagggcttcgagcttgatcttttgaaagttttattctattaaatttttgctatatcttctggttttctgaaaaagctttagaatggtttctataccctttgtatcactgcatttttccatatcatctccggttcgatcgcgtccagatggaaaacggaagcagaggcttctaatcgtcgcatttactggctccagtgcaacacatccatctgaaaacactcggaagtctggtgcttggagagggtgccattgtctcttgtac

SEQ ID NO: 615 - DNA, 497 bp, Homo sapiens
  misc_feature (1)..(497): 213142_x_at
ctgctgccattttaatcttgctcattaaccttactcctttgagaattctttaacaatatttaaaattggtaacaaaaatagtttagccataattgtttagccatgtgagtttcaggttggtacacgttcagacagaactgctgtatcacattccaattttgaatagccagtgagcaatcaagtgtagagaaatgataaatggcctaagaaggcatacagtggcataaacgatgctcttcctagtagcttaataggccacaagctagtttctgttgcactctgaaataaaatatgctttaaaaatgtagggaacagtgcttagaaaagcaaaaactaggtgtgtcattgaaataataggcataaaaattaaatgttacataagaacactatttggaaagagggtccttttaaaaactgaatttgtactaaatcagatttgccatgtccagtacagaataatttgtacttagtatttgcagcagggtttgtctttgtga

SEQ ID NO: 616 - DNA, 533 bp, Homo sapiens
  misc_feature (1)..(533): 213147_at
tcctgggccgttacatctgtgcagggctggtttgttctgactttttgtttctttgtgtttgcttggtgctggtttatttgttgttttctgggggaaaaagccatatcatgctaaaattctatagagatagatattgtcctaagtgtcaagtcctgactgggctgggtttgctgtcttggggtcccactgctcgaaatggcccctgtcttcggccgagctggtttcctgcccagcctggggcaaacctagccggaaggccgaggtcccattgttggcgctgaggtgtctggcctgaggtcaatggtgcaaaggagccgccaccgggcatgtctgcctggagtgctgtgctgtgtttaatcaggggatacaggcccctgggtttcttttttctttcttcctttcttccttggccaagagaagggcttacaggcatggacatgcaggttggcaaacgggcttgactttggctgatttaaaaagtgagaaagaaagtaaaaaaggttaatttttccttcctctgtaagatatcccag

SEQ ID NO: 617 - DNA, 535 bp, Homo sapiens
  misc_feature (1)..(535): 213150_at
  misc_feature (212)..(212): n is a, c, g, or t
  misc_feature (375)..(375): n is a, c, g, or t
aaggtcttacattgcctgactaaaatgtttcatttacctctaaatttccatatccttctggctgtagataaataatgtagttttgtttatgcatttggaattagtggatttttttgtcattaaaattgttaccactggtaacatgtgacaagcacaccacaattctccctatcttgtgaagttgtttttttaaatcgccttgaacaaaaagnttttttttttgtttgtttttgctttctgaaattcacagaagcctaggaggactggggtaagcggaataaactagagaagggagacattgtttggatttcctttatactgtgaagttacatgcataaaagggtcaaacctgtagatgcagaaaaagaaaaaaanctataaatacaaatctgtataaatgtctattattatgaagaattgccaatcttgttttaagcaaatgcattctatcgttattataaatgttagttctagctctatttacttctaatcttaaatcagaataaattaatattgtattgctgctgtgcgtgga

SEQ ID NO: 618 - DNA, 492 bp, Homo sapiens
  misc_feature (1)..(492): 213170_at
gggcttgggacccaactgtgtcagtggaggaggtcagaccccagatcacagcgctcgtgaggaagctcatcctactgaagcgagaagacttataaccaccgcgtctcctcctccaccacctcatcccgcccacctgtgtggggctgaccaatgcaaactcaaatggtgcttcaaagggagagacccactgactctccttcctttactcttatgccattggtcccatcattcttgtgggggaaaaattctagtattttgattatttgaatcttacagcaacaaataggaactcctggccaatgagagctcttgaccagtgaatcaccagccgatacgaacgtcttgccaacaaaaatgtgtggcaaatagaagtatatcaagcaataatctcccacccaaggcttctgtaaactgggaccaatgattacctcatagggctgttgtgaggattaggatgaaatacctgtgaaagtgcctaggcagtgccagcca

SEQ ID NO: 619 - DNA, 476 bp, Homo sapiens
  misc_feature (1)..(476): 213260_at
  misc_feature (89)..(89): n is a, c, g, or t
tcccccatttacaatccttcatgtattacatagaaggattgcttttttaaaaatatactgcgggttggaaagggatatttaatctttgngaaactattttagaaaatatgtttgtagaacaattatttttgaaaaagatttaaagcaataacaagaaggaaggcgagaggagcagaacattttggtctagggtggtttctttttaaaccattttttcttgttaatttacagttaaacctaggggacaatccggattggccctcccccttttgtaaataacccaggaaatgtaataaattcattatcttagggtgatctgccctgccaatcagactttggggagatggcgatttgattacagacgttcgggggggtggggggcttgcagtttgttttggagataatacagtttcctgctatctgccgctcctatctagaggcaacacttaagcagtaattgctgttgcttgttgtca

SEQ ID NO: 620 - DNA, 430 bp, Homo sapiens
  misc_feature (1)..(430): 213300_at
gctcggacagtgcccaagactgagcctggggtgcccggcacccagagggtgctgcccaccatgctcctgagcctcccaagagctgcagcccacgggcccggcccggcctggcccttcaggggatggccactgtgaaggacgccttcccagcctgcccgttgccaatctgctgtgagaggggggcctccctgccttggggccttagccctggctctgcacttttcctccggggagaaaggacactgcccctcccccgacctgggcccacactgctgccttctcccaggacggaggcttttggaccctcggaccccatcccactcagccaagtgtctttctgtgtctggggggaggaggggatgatatccgtgtggttcgatgtattatttttaagctccgtgagtgcgtgggtcagtgtctgcatgaagtg

SEQ ID NO: 621 - DNA, 488 bp, Homo sapiens
  misc_feature (1)..(488): 213301_x_at
  misc_feature (27)..(27): n is a, c, g, or t
  misc_feature (28)..(28): n is a, c, g, or t
  misc_feature (29)..(29): n is a, c, g, or t
  misc_feature (30)..(30): n is a, c, g, or t
  misc_feature (33)..(33): n is a, c, g, or t
  misc_feature (34)..(34): n is a, c, g, or t
  misc_feature (48)..(48): n is a, c, g, or t
  misc_feature (58)..(58): n is a, c, g, or t
  misc_feature (64)..(64): n is a, c, g, or t
  misc_feature (69)..(69): n is a, c, g, or t
  misc_feature (74)..(74): n is a, c, g, or t
  misc_feature (77)..(77): n is a, c, g, or t
  misc_feature (78)..(78): n is a, c, g, or t
  misc_feature (80)..(80): n is a, c, g, or t
  misc_feature (82)..(82): n is a, c, g, or t
  misc_feature (84)..(84): n is a, c, g, or t
  misc_feature (85)..(85): n is a, c, g, or t
  misc_feature (92)..(92): n is a, c, g, or t
  misc_feature (94)..(94): n is a, c, g, or t
  misc_feature (100)..(100): n is a, c, g, or t
  misc_feature (102)..(102): n is a, c, g, or t
aagagtttgtgactattctcatctctnnnnttnnttggacgtttactnagactttgantttccnttaantagcncanntntntnntgttaancnctcttnantcactaagaaagaaaggaaagaaggagatgaatagaagaaagaaaatggaaagaaggaaaaaaggaggatagaaaaaggatggaagaaagaagcattgaaaacaaagacattcttcccacttcttggatttttaaaccacagtctggagtgatagctactgtagaaaggaaatagactttgtatgaactctttaagttgaaaagtaaaaaatatatgtggtttggatgtgtgctttaattcagctttagaaattaataccactacccgtgaattatatggcctgacaatatgaattaggtgtactgtactgaagaacagtactccacaaacatgggtggtaacaagagttccatcccaggaggccaaacggtgcaacagaagggta

SEQ ID NO: 622 - DNA, 559 bp, Homo sapiens
  misc_feature (1)..(559): 213338_at
ggtgtgcttcgtgctgtagttatcgttagttcctcttcccgagatggggccgccgagagaccccagcgcctttgaaaagcaaggtttgtgctgcgcttccagttccgaaaagcagatgtttaagcccttggactgagggtgggatcgcagctccgaagacggagaggagggaaatggggccctttcccctctattgcatccccctgcccgactccttccccgcacccacgtgccctagattcatggcagaaaatgaccaaatcctgtgtatttgttttatatatttaataactgttttaaatgaaagttttagtaaaaaaaatacaaaacaaaaagattaaattgctattgctgtagtaagagaagctctttgtatctgaacatagttgtatttgaaatttgtggttttttaatttatttaaaattggggggagggcatgggaaggatttaacaccgatatattgttaccgctgaaaatgaactttatgaaccttttccaagttgatctatccagtgacgtggcctggtgggcgtttcttcttgtacttatgtggtttt

SEQ ID NO: 623 - DNA, 483 bp, Homo sapiens
  misc_feature (1)..(483): 213346_at
  misc_feature (389)..(389): n is a, c, g, or t
gcagctgcttctgtaatgtgtcacattgagccagatgatggtgatgattttgttcggggtctcatttgtatttcttacccactgcaccatccaaagcagcagcataaactcagagatgaagacctctttcgtttaaaagagcctgtactgtttgtgtcaggctcagcagatgaaatgtgtgaaaagaacttgttggagaaagtggcacagaaaatgcaagctccccataaaatccactggattgagaaggcaaatcattccatggcagtgaaaggacggtcgacaaatgatgttttcaaagaaataaatacacagattttgttttggatccaagaaattactgaaatggacaagaaatgtcattagttaaaagccatgttatcttgagnacacatacagttaatttgataaagaagagtatgcctctcagcattgtgagatatatttcagactaatttgatgttctttaatgttcccttattt

SEQ ID NO: 624 - DNA, 445 bp, Homo sapiens
  misc_feature (1)..(445): 213361_at
ggactggtatctgtgtatgagctggattatggcaaacacgaattagtcaacataagaaaagtacagcccctagtggacatgttccgaaagctgcccttccaagcagtcacagctcaacttgcaggagtgaagtgcaaccagtggtctgaggaggcttctatggtgtttcgaaatcatgtggagaagaaacctctggtggcactggtgcagacagtcattgaaaatgctaacccttgggaccggaaagtagtggtctacttagtggacacatcgttgccagacaccgatacctggattcatgattttatgtcagagtatctgatagagctttcaaaagttaattaatgactgcctctgaaaccttgacaactaattcagattttttagcaataacaaaatgtagtaggcttaaaaaaaatcttaactctgctacatggctctgact

SEQ ID NO: 625 - DNA, 382 bp, Homo sapiens
  misc_feature (1)..(382): 213366_x_at
tttcccttaataccgttgcaagtctgacagcatgagtatctatgacgatattgatgctgacgtgctgcaaaattaccaagaatacaatctggccaacatcatctactactctctgaaggagtccaccactagtgagcagagtgccaggatgacagccatggacaatgccagcaagaatgcttctgagatgattgacaaattgacattgacattcaaccgtacccgccaagctgtcatcacaaaagagttgattgaaattatctctggtgctgcagctctggattaatgaaaatcaagttccatcctcagacaagaggtaaagaaggaaaattcagccagttgattttgtttttagcttactgctgcctttgtccgaagaaac

SEQ ID NO: 626 - DNA, 540 bp, Homo sapiens
  misc_feature (1)..(540): 213376_at
ggcatggccaggtatgtctgttccatttgtgatcaaggaaacttcagaaaacatgaccatgtacggcatatgatttctcatttatctgctggtgagactatatgccaggtctgctttcagatattcccaaataatgaacagttggagcagcacatggatgttcatctgtatacatgtggaatatgtggagcaaaatttaatttgaggaaagatatgagatcacattataatgccaagcatttgaaaagaacctgagtgattttctactgtactaatgtttagatgatagcagataaaacaccaaagcaaaggatatgagctatttaggaattgattatataagatgatttgttagaaacaaatttcaaggcccttttaactttaatatttttgtttaggattttaagtatctacatttaggtattaaatgtttatcatttttgttgtttcttaatagaattatttgtttttagtttttcttagctatgattaaaatttttaaatgtagactacaagtggttgttacccattcaatgacta

SEQ ID NO: 627 - DNA, 529 bp, Homo sapiens
  misc_feature (1)..(529): 213479_at
atcatccttccttagactgatgctttgactgaatcatcactagctatggcattaaaaggcctctcttctcatctggtgccaaaggttccgttgcagctttttacaaccatccggtgtggtttggaggatttgttttttttttttcccaacagaaaagaacagccattagaagaaggctcccattttctgatgttccgccccactgtgaagagtgtgctcgttttaaattcatgttgattcttgtaagcactggactgtcttcatcaagtatttccctacagaactcctcaagaaaacagagatcatttggctagagattgtctgagtgactccaagctactcactgtattggacgggagtagtaatttattttaaagataaagtgactaagtggggaaatttataaagctaaatattatatattttatttttcatacatgtttgaagtgcaaatctgtggatattccatttgtaggaccaagtcgacatgcccatcctgacattgtatgctacgagaactcttctgatg

SEQ ID NO: 628 - DNA, 366 bp, Homo sapiens
  misc_feature (1)..(366): 213507_s_at
aggctagaagtagcttttctgtcttttggccagtgccgagtggaatgcctggtttgggggaggaggagggactgggttcagctgtggtgctttgttgtaaaaggcagcctggcctttgctactgaggagaaagatggagcctgggtctcaagcccaccttcgctgtacctttgccacatggtactgtatgcttgccagctagaaggagggtcagggattttttacagtctgagaatgagtgtgtgtgagtgaggcggtatccacattctcaacttcaagtcattgcagtttctttttcccagaaaacaaggggttagatgttgcatttcataaaactaaccgaagttctgtctactgatgcagcac

SEQ ID NO: 629 - DNA, 234 bp, Homo sapiens
  misc_feature (1)..(234): 213515_x_at
  misc_feature (81)..(81): n is a, c, g, or t
  misc_feature (82)..(82): n is a, c, g, or t
ggatgatctcaagggcacctttgcccagctgagtgaactgcactgtgacaagctgcatgtggatcctgagaacttcaagcnncctgggaaatgtgctggtgaccgttttggcaatccatttcggcaaagaattcacccctgaggtgcaggcttcctggcagaagatggtgactggagtggccagtgccctgtcctccagataccactgagctcactgcccatgatgcagagctt

SEQ ID NO: 630 - DNA, 503 bp, Homo sapiens
  misc_feature (1)..(503): 213524_s_at
  misc_feature (419)..(419): n is a, c, g, or t
gtgctcggcctgatggagactgtgtgcagccccttcacggccgccagacgtctgcgggaccaggaggcagccgtggcggagctgcaggccgccctggagcgacaggctctccagaagcaagccctgcaggagaaaggcaagcagcaggacacggtcctcggcggccgggccctgtccaaccggcagcacgcctcctaggaactgtgggagaccagcggagtgggagggagacgcagtagacagagacagaccgagaaggaagggagagacagagggggcgcgcgcacaggagcctgactccgctgggagagtgcaggagcacgtgctgttttttatttggacttaacttcagagaaaccgctgacatctagaactgacctaccacaagcatccaccaaaggagtttgggattgagtttntgctgctgtgcagcactgcattgtcatgacatttccaacactgtgtgaattatctaaatgcgtctaccattttgcactagggag

SEQ ID NO: 631 - DNA, 426 bp, Homo sapiens
  misc_feature (1)..(426): 213541_s_at
ctcgagggttcatgcagtcagtgttataccaaacccagtgttaggagaaaggacacagcgtaatggagaaaggggaagtagtagaattcagaaacaaaaatgcgcatctctttctttgtttgtcaaatgaaaattttaactggaattgtctgatatttaagagaaacattcaggacctcatcattatgtgggggctttgttctccacagggtcaggtaagagatggccttcttggctgccacaatcagaaatcacgcaggcattttgggtaggcggcctccagttttcctttgagtcgcgaacgctgtgcgtttgtcagaatgaagtatacaagtcaatgtttttccccctttttatataataattatataacttatgcatttatacactacgagttgatctcggccagccaaagacacacgacaa

SEQ ID NO: 632 - DNA, 528 bp, Homo sapiens
  misc_feature (1)..(528): 213572_s_at
  misc_feature (73)..(73): n is a, c, g, or t
  misc_feature (106)..(106): n is a, c, g, or t
  misc_feature (138)..(138): n is a, c, g, or t
agcttagtgctttattacctgagtttttaatagagccaatatgtcttatatctttaccaataaaaccactgtncagaaacaagtctttcattttctttgtaagttnggctctgttggctgtttacacccatgaatttnggcatgggtatctatttttcttttttacattgaaaaaaatccagtggttgcttttgaatgcatcaagtaaagaagaagaaaagaatacatccgatgcgtagattcttgaccatgtagtaatctataaaattgctatatcctcctgatagccatgggaaaacatgataagatggtcatttattttgcagttagaattttggaagccacaaaatagacagacaccctgactgttgaagggaggtttaaaaacagatattcaattgaaatgtaagagagcaccccaattgagagcccaggttacgaagacaagcttgcctcgcctgacttttctgtcccttgttctgcaggattagtattctgttacagacctctagtttttagactcttcaa

SEQ ID NO: 633 - DNA, 263 bp, Homo sapiens
  misc_feature (1)..(263): 213587_s_at
  misc_feature (92)..(92): n is a, c, g, or t
  misc_feature (190)..(190): n is a, c, g, or t
aggggaagaaacgacagcctcacttctgtatggactgctgatgtggcctgccatcctgttcagcgggcattgtctttggagcagcaggagantaggatgcctctcactcacatgccagttcctggctggccagctgctcagggctcaggctggggcctcccattgacatcctccccctacactccctctntgagcctccgtcgcccctcctgttgggtaagggtgttgagtgtgacttgtgctgaaaacctggttcatatata

SEQ ID NO: 634 - DNA, 303 bp, Homo sapiens
  misc_feature (1)..(303): 213617_s_at
  misc_feature (113)..(113): n is a, c, g, or t
  misc_feature (119)..(119): n is a, c, g, or t
  misc_feature (121)..(121): n is a, c, g, or t
  misc_feature (122)..(122): n is a, c, g, or t
  misc_feature (123)..(123): n is a, c, g, or t
agacctggaggacgatacacatgaagccagtgatgatcagccagagaagcctcactttgactctcgcagtgtgatatttgagctggattcatgcaatggcagtgggaaagttngccttntnnnctacaaaagtgggaaaccagcattagcagaagacactgagatctggttcctggacagagcgttatactggcattttctcacagacacctttactgcctattaccgcctgctcatcacccacctgggcctgccccagtggcaatatgccttcaccagctatggcattagcccacaggccaa

SEQ ID NO: 635 - DNA, 320 bp, Homo sapiens
  misc_feature (1)..(320): 213758_at
  misc_feature (87)..(87): n is a, c, g, or t
  misc_feature (186)..(186): n is a, c, g, or t
acgacccgaatctatttgatcttccaggtcaccttgggctctgtttgtcagatcctgttatccatagcctttagagaggaccttctncttttagcttattttgttgctaactttttacaaacaaagggctaattttaaaatgtcagtgttgtcagtggtcagaaaccgtgtgtttgagcgggtgtngagtggcaggtggctctgctgacctggtggctggtgtgtcgggaggatttaacctgtgtgagggattggcctagaaacaacctgttgagatagtcttgccccataacctgtctcacaccgtagtgtacggcccc

SEQ ID NO: 636 - DNA, 520 bp, Homo sapiens
  misc_feature (1)..(520): 213779_at
  misc_feature (97)..(97): n is a, c, g, or t
  misc_feature (329)..(329): n is a, c, g, or t
  misc_feature (374)..(374): n is a, c, g, or t
ccttctgccatctaggccttaggggtaagcaggtctcagtcctggcaccatgcacatgtctgaggctgagcaagggctgagaggagaggcttgggcntcagtttccctctgtgaagtggggggaggcaggccttcaaggagggatagaggtacaaggcttcgtctcatctgctgtctgagcatccaggcccaaaggcactgagggagtcaggagctggggctcggcacatgcagagatgacagggcagggggcagtcttcctccccctccccgaccaaacctcggggagccctcctgtgcccctccctccttgttgtccagtgctgggntccccaccccgaggtcaggctgcccaatcctctgactggatcacngggggcttcttgcctcagttcttccctctgagcccccaggccctcccgcatctcaggttggggatggggacatggagaggaaggggccgcctactcctgcaaatgcttgtgacagatgccaggaggtagatgtgtgctggccaata

SEQ ID NO: 637 - DNA, 237 bp, Homo sapiens
  misc_feature (1)..(237): 213831_at
  misc_feature (27)..(27): n is a, c, g, or t
  misc_feature (46)..(46): n is a, c, g, or t
  misc_feature (136)..(136): n is a, c, g, or t
  misc_feature (186)..(186): n is a, c, g, or t
actattctctggcccgatttatcatancccttttctcctccaaatntttctcctctcaccttttctctgggacttaagctgctatatcccctcagagctcacaaatgcctttacattctttccctgacctcctgantttttttttcttttctcaaatgttacctacaaagacatgcctggggtaanccacccggctacctaattcctcagtaacctccatctaaaatctccaaggaa

SEQ ID NO: 638 - DNA, 494 bp, Homo sapiens
  misc_feature (1)..(494): 213844_at
ccctggatgcgcaagctgcacataagtcatgacaacataggcggcccggaaggcaaaagggcccggacggcctacacgcgctaccagaccctggagctggagaaggagttccacttcaaccgttacctgacccgcagaaggaggattgaaatagcacatgctctttgcctctccgagagacaaattaaaatctggttccaaaaccggagaatgaagtggaaaaaagataataagctgaaaagcatgagcatggccgcggcaggaggggccttccgtccctgagtatctgagcgtttaaagtactgagcagtattagcggatcccgcgtagtgtcagtactaaggtgactttctgaaactcccttgtgttccttctgtgaagaagccctgttctcgttgccctaattcatcttttaatcatgagcctgtttattgccattatagcgcctgtataagtagatctgctttctgttcatctctttgtcctgaatggct

SEQ ID NO: 639 - DNA, 360 bp, Homo sapiens
  misc_feature (1)..(360): 213854_at
  misc_feature (292)..(292): n is a, c, g, or t
gtccttggctccaggagcccacaggctggggaggagaaaacaaacacatcaatatctcttccaaatggacagccgtggacagttaccaggtaggtagcggccccatacatgggctgcctagaggcgttcatggtccccattgctgagctgtgggtgcagagcaatagcctctcccttcacagcggtgtgaagagtgacctcactgtccttagggttagcatcctggccgaggatgtcacagggctcctggtctggctctgtcctcatgtgctatgtgaccctgacaaacccntgcacctctctcagcctcagtccacttacctgaactgaggggtgataatggaccaacctctcaaggct

SEQ ID NO: 640 - DNA, 482 bp, Homo sapiens
  misc_feature (1)..(482): 213906_at
  misc_feature (68)..(68): n is a, c, g, or t
  misc_feature (70)..(70): n is a, c, g, or t
  misc_feature (71)..(71): n is a, c, g, or t
gtagcaaactcatactggatcatttcagttaccttgaactaatagcacataatggttttttgttgttntnntttttaatgtagcccttacctggatatacatagtctgcaatcaccaaagtataatatcttgtaaggctatattttttaaagcatattttttcttgagcattaaattatcctaaatggtaatatattgtggataagtctgggcttattggacataatacatatttgggttggtactggttgaatccttcagttaactgctttgttgctttttgcaagattttttatcttaaacatgtcaggcatcttaagtcacctttatactgttttgttcctctgagtttctttcagtatgttatacaaatgccagacataacatgtagcagccatacttgcatggaaactgactacacatacataatactgcattttattgtaaggttttcacattaatacagcaattaccctgactaa

SEQ ID NO: 641 - DNA, 467 bp, Homo sapiens
  misc_feature (1)..(467): 213915_at
  misc_feature (68)..(68): n is a, c, g, or t
atttctggtttgaggctgtgggtcccacccactcagctcactcgggcctctggccaacagggcatggngacatcatatcaggctacatccacgtgacgcagaccttcagcattatggctgttctgtgggccctggtgtccgtgagcttcctggtcctgtcctgcttcccctcactgttccccccaggccacggcccgcttgtctcaaccaccgcagcctttgctgcagccatctccatggtggtggccatggcggtgtacaccagcgagcggtgggaccagcctccacacccccagatccagaccttcttctcctggtccttctacctgggctgggtctcagctatcctcttgctctgtacaggtgccctgagcctgggtgctcactgtggcggtccccgtcctggctatgaaaccttgtgagcagaaggcaagagcggcaagatgagttttgagcgttgtattcca

SEQ ID NO: 642 - DNA, 588 bp, Homo sapiens
  misc_feature (1)..(588): 214032_at
  misc_feature (47)..(47): n is a, c, g, or t
  misc_feature (63)..(63): n is a, c, g, or t
  misc_feature (260)..(260): n is a, c, g, or t
aagggccggaggtcatggccttcatcgagcagggcaagcggatggantgcccaccagagtgtnccacccgaactgtacgcactcatgagtgactgctggatctacaagtgggaggatcgccccgacttcctgaccgtggagcagcgcatgcgagcctgttactacagcctggccagcaaggtggaagggcccccaggcagcacacagaaggctgaggctgcctgtgcctgagctcccgctgcccaggggagccctccacnccggctcttccccaccctcagccccaccccaggtcctgcagtctggctgagccctgcttggttgtctccacacacagctgggctgtggtagggggtgtctcaggccacaccggccttgcattgcctgcctggccccctgtcctctctggctggggagcagggaggtccgggagggtgcggctgtgcagcctgtcctgggctggtggctcccggagggccctgagctgagggcattgcttacacggatgccttcccctgggccctgacattggagcctgggcatcctcaggtggtcaggcgtagatcaccagaataaacccagcttccc

SEQ ID NO: 643 - DNA, 239 bp, Homo sapiens
  misc_feature (1)..(239): 214039_s_at
atatttgatatacttctgcctaacaacatggaaaagggttttcttttccctgcaagctacatcctactgctttgaacttccaagtatgtctagtcaccttttaaaatgtaaacattttcagaaaaatgaggattgccttccttgtatgcgctttttaccttgactacctgaattgcaagggatttttatatattcatatgttacaaagtcagcaactctcctgttggttcattattgaa

SEQ ID NO: 644 - DNA, 516 bp, Homo sapiens
  misc_feature (1)..(516): 214049_x_at
gaattcggcggcatgtgtggtgtacgaggacatgtcgcacagccgctgcaacacgctgtcctcccccaaccagtaccagtgacccagtgggcccctgcacgtcccgcctgtggtccccccagcaccttccctgccccaccatgccccccaccctgccacacccctcaccctgctgtcctcccacggctgcagcagagtttgaagggcccagccgtgcccagctccaagcagacacacaggcagtggccaggccccacggtgcttctcagtggacaatgatgcctcctccgggaagccttccctgcccagcccacgccgccaccgggaggaagcctgactgtcctttggctgcatctcccgaccatggccaaggagggcttttctgtgggatgggcctgggcacgcggccctctcctgtcagtgccggcccacccaccagcaggcccccaacccccaggcagcccggcagaggacgggaggagaccagtcccccacccagccgtaccagaaataaag

SEQ ID NO: 645 - DNA, 420 bp, Homo sapiens
  misc_feature (1)..(420): 214106_s_at
cagaagctgaactggaagccccgggtcgctttcgatgagctggtgagggagatggtgcacgccgacgtggagctcatgaggacaaaccccaatgcctgagcagcgcctcggagcccggcccgccctccggctacaatccccgcagagtctccggtgcagacgcgctgcggggatggggagcggcgtgccaatctgcgggtcccctgcggcccctgctgccgctgcgctgtcccggccgcaagagcggggccgccccgccgaggtttgtagcagccgggatgtgaccctccagggtttgggtcgctttgcgtttgtcgaagcctcctctgaatggctttgtgaaatcaagatgttttaatcacattcactttacttgaaattatgttgttacacaacaaattgtggggccttcaaattgtt

SEQ ID NO: 646 - DNA, 446 bp, Homo sapiens
  misc_feature (1)..(446): 214146_s_at
  misc_feature (41)..(41): n is a, c, g, or t
  misc_feature (122)..(122): n is a, c, g, or t
  misc_feature (148)..(148): n is a, c, g, or t
  misc_feature (152)..(152): n is a, c, g, or t
  misc_feature (159)..(159): n is a, c, g, or t
tgacttgtatgctgaactccgctgcatgtgtataaagacancctctggaattcatcccaaaaacatccaaagtttggaagtgatcgggaaaggaacccattgcaaccaagtcgaagtgatanccacactgaaggatgggaggaaaatnctgncctggancccagatgctcccagaatcaagaaaattgtacagaaaaaattggcaggtgatgaatctgctgattaatttgttctgtttctgccaaacttctttaactcccaggaagggtagaattttgaaaccttgattttctagagttctcatttattcaggatacctattcttactgtattaaaatttggatatgtgtttcattctgtctcaaaaatcacattttattctgagaaggttggttaaaagatggcagaaagaagatgaaaataaataagcctggtttcaaccctct

SEQ ID NO: 647 - DNA, 449 bp, Homo sapiens
  misc_feature (1)..(449): 214219_x_at
ctgggcgagatgagcaccgagcacaggggacccgtgcaggtgacccaggtagaggaagatatggtgatggtgttgatggatggctctgtgaagctggtgaccccggaggggtccccagtccggggacttcgcacacctgagatccccatgaccgaagcggtggaggccgtggctatggttggaggtcagcttcaggccttctggaagcatggagtgcaggtgtgggctctaggctcggatcagctgctacaggagctgagagaccctaccctcactttccgtctgcttggctcccccaggcctgtagtggtggagacacgcccagtggatgatcctactgctcccagcaacctctacatccaggaatgagtccctaggggggtgtcaggaactagtccttgcaccccctcccccatagacacactagtggtcatggcatgtcctcatct

SEQ ID NO: 648 - DNA, 323 bp, Homo sapiens
  misc_feature (1)..(323): 214236_at
ttggtcacattctgatcctttggtaagccgatctgtcttgcaatatacatgtcccgacgatggaaggggaaagcgagctgaatcaccaaactcaggaacgataatatcatcgtggcttttctgcttatgaaacactccacccgataagatttgatccccttctgcaagcttgctgagatcaacacaacatttcgcaagcaggcatttgcattgcggggtagtacaactgtgtcctttcaagagtctatatgttttataggcctttcctgagcggtaagaacaggtcgccagtaagaacaaggcttcttctgagtgtacttctg

SEQ ID NO: 649 - DNA, 472 bp, Homo sapiens
  misc_feature (1)..(472): 214321_at
  misc_feature (87)..(87): n is a, c, g, or t
  misc_feature (110)..(110): n is a, c, g, or t
actcatcatactttggtgtgcactagtgcaattccaagataatatcactggtatgagtcagtgaagtctacatcctctgatagctgnttcaaatgtgcattttgtggaanttttgagaaaaatagagcaaaatcaacatgactggtggtgagagaccacacattttatgagagtttggaattattgtagacatgcccaaaacttatccttgggccataattatgaaaactcatgatcaagatatatgtgtatacatacatgtatctggtttgtcaggctacaaggtaggctgcaaaattaaatctagacattcttttaatgccaccacacgtgttccgcttctctcttttaaagtatttataaaaatataaattgtacattttgtaaaatattatgtttgatttctctacttgtcatatcactaaataaacacgattttattgctgcgtgactctgtattactttggtgcat

SEQ ID NO: 650 - DNA, 448 bp, Homo sapiens
  misc_feature (1)..(448): 214390_s_at
gtcccatattcaacatctgctagtctgtatattcgtcctacattcattggaactgagccttctcttggagtcaagaagcctaccaaagccctgctctttgtactcttgagcccagtgggaccttatttttcaagtggaacctttaatccagtgtccctgtgggccaatcccaagtatgtaagagcctggaaaggtggaactggggactgcaagatgggagggaattacggctcatctctttttgcccaatgtgaagcagtagataatgggtgtcagcaggtcctgtggctctatggagaggaccatcagatcactgaagtgggaactatgaatctttttctttactggataaatgaagatggagaagaagaactggcaactcctccactagatggcatcattcttccaggagtgacaaggcggtgcattctggacctggcacatcagt

SEQ ID NO: 651 - DNA, 459 bp, Homo sapiens
  misc_feature (1)..(459): 214407_x_at
  misc_feature (149)..(149): n is a, c, g, or t
  misc_feature (339)..(339): n is a, c, g, or t
gcaggaaccagctcatgatctcaggatgtatggaaaaataatctttgtattactattgtcagaaattgtgagcatatcagcattaagtaccactgaggtggcaatgcacacttcaacctcttcttcagtcacaaagagttacatctcantcacagacaaatggagaaacgggacaacttgtccatcgtttcactgtaccagctcctgtagtgataatactcattattttgtgtgtgatggctggtattattggaacgatcctcttaatttcttacagtattcgccgactgataaaggcatgaggatgtggcctgcatgctgcctgatcttgcctagaancggctgcacctgctgttctcttgtttatgcaaactggctgcacctgctattcctttgcttatgcccctacccctggctatcctaattccctgttctcctgcctcactattactgtattct

SEQ ID NO: 652 - DNA, 543 bp, Homo sapiens
  misc_feature (1)..(543): 214433_s_at
  misc_feature (324)..(324): n is a, c, g, or t
cttcctcggaggcagcattgttaagggaggccctgtgcaagtgctggaggacgaggaactaaagtcccagccagagcccctagtggtcaagggaaaacgggtggctggaggccctcagatgatccagctcagcctggatgggaagcgcctctacatcaccacgtcgctgtacagtgcctgggacaagcagttttaccctgatctcatcagggaaggctctgtgatgctgcaggttgatgtagacacagtaaaaggagggctgaagttgaaccccaacttcctggtggacttcgggaaggagccccttggcccagcccttgcccnatgagctccgctaccctgggggcgattgtagctctgacatctggatttgaaggctccaccctcatcacccacactccctattttgggccctcacttccttggggacctggcttcattctgctctctcttggcacccgacccttggcagcatgtaccacacagccaagctgagactgtggcaatgtgttgagtcatatacatttactgaccactgttgct

SEQ ID NO: 653 - DNA, 469 bp, Homo sapiens
  misc_feature (1)..(469): 214455_at
agagttactctgtgtacgtgtacaaggtgctgaaacaggtccatcccgacactggcatctcttccaaggccatgggcatcatgaattctttcgttaacgacatatttgagcgcatcgcgggcgaggcttcccgcctggcgcattacaacaagcgctcgaccatcacctccagggagatccagacggccgtgcgcctgctgcttcccggagagctggccaagcacgccgtgtcggagggcaccaaggccgtcaccaagtacaccagctccaagtaaacattccaaggggagacaacagcttttagacatatcttttccaacagtcgtcactgctggacactgtttcatcttgcaaataaaccaatgaaaatgagtgatcctagaagaagataaatggaggtattttgaacaatcaaagaaggacaaatgaacacctggctgagaaaaattagctcttttttctatgcata

SEQ ID NO: 654 - DNA, 485 bp, Homo sapiens
  misc_feature (1)..(485): 214470_at
  misc_feature (407)..(407): n is a, c, g, or t
ggttcaccttggcatcaatttgccctgaaacttagctgtgctgggattattctccttgtcttggttgttactgggttgagtgtttcagtgacatccttaatacagaaatcatcaatagaaaaatgcagtgtggacattcaacagagcaggaataaaacaacagagagaccgggtctcttaaactgcccaatatattggcagcaactccgagagaaatgcttgttattttctcacactgtcaacccttggaataacagtctagctgattgttccaccaaagaatccagcctgctgcttattcgagataaggatgaattgatacacacacagaacctgatacgtgacaaagcaattctgttttggattggattaaatttttcattatcagaaaagaactggaagtgganaaacggctcttttttaaattctaatgacttagaaattagaggtgatgctaaagaaaacagctgtatttccatctcaca

SEQ ID NO: 655 - DNA, 113 bp, Homo sapiens
  misc_feature (1)..(113): 214500_at
tggccagaagttgcaagttgtacaggctgacattgcctcgatcgacagtgatgctgtcgttcacccgacaaacactgacttctacatcggtggtgaagtaggaaacacgctgg

SEQ ID NO: 656 - DNA, 389 bp, Homo sapiens
  misc_feature (1)..(389): 214501_s_at
  misc_feature (212)..(212): n is a, c, g, or t
ggcccttggaagtagctggagctgctgtcagcgcaggccatggcctgcctgccaagtttgtgatccactgtaatagtccagtttggggtgcagacaagtgtgaagaacttctggaaaagacagtgaaaaactgcttggccctggctgatgataagaagctgaaatccattgcatttccatccatcggcagcggcaggaacggttttccaaancagacagcagctcagctgattctgaaggccatctccagttacttcgtgtctacaatgtcctcttccatcaaaacggtgtacttcgtgctttttgacagcgagagtataggcatctatgtgcaggaaatggccaagctggacgccaactaggctgagcaatgacagaaccagctgcac

SEQ ID NO: 657 - DNA, 370 bp, Homo sapiens
  misc_feature (1)..(370): 214567_s_at
ggacctcagccatgagacttctcatcctggccctccttggcatctgctctctcactgcatacattgtggaaggtgtagggagtgaagtctcacataggaggacctgtgtgagcctcactacccagcgactgccagttagcagaatcaagacctacaccatcacggaaggctccttgagagcagtaatttttattaccaaacgtggcctaaaagtctgtgctgatccacaagccacgtgggtgagagacgtggtcaggagcatggacaggaaatccaacaccagaaataacatgatccagaccaagccaacaggaacccagcaatcgaccaatacagctgtgaccctgactggctagtagtctctggcacc

SEQ ID NO: 658 - DNA, 436 bp, Homo sapiens
  misc_feature (1)..(436): 214575_s_at
atgagcgagaatggctacgacccccagcagaacctgaacgacctgatgctgcttcagctggaccgtgaggccaacctcaccagcagcgtgacgatactgccactgcctctgcagaacgccacggtggaagccggcaccagatgccaggtggccggctgggggagccagcgcagtggggggcgtctctcccgttttcccaggtttgtcaacgtgactgtgacccccgaggaccagtgtcgccccaacaacgtgtgcaccggtgtgctcacccgccgcggtggcatctgcaatggggacgggggcacccccctcgtctgcgagggcctggcccacggcgtggcctccttttccctggggccctgtggccgaggccctgacttcttcacccgagtggcgctcttccgagactggatcgatggtgttctcaacaacccgg

SEQ ID NO: 659 - DNA, 531 bp, Homo sapiens
  misc_feature (1)..(531): 214617_at
  misc_feature (41)..(41): n is a, c, g, or t
  misc_feature (43)..(43): n is a, c, g, or t
  misc_feature (44)..(44): n is a, c, g, or t
  misc_feature (114)..(114): n is a, c, g, or t
  misc_feature (115)..(115): n is a, c, g, or t
  misc_feature (116)..(116): n is a, c, g, or t
  misc_feature (118)..(118): n is a, c, g, or t
  misc_feature (119)..(119): n is a, c, g, or t
  misc_feature (120)..(120): n is a, c, g, or t
  misc_feature (121)..(121): n is a, c, g, or t
  misc_feature (122)..(122): n is a, c, g, or t
  misc_feature (123)..(123): n is a, c, g, or t
  misc_feature (124)..(124): n is a, c, g, or t
  misc_feature (125)..(125): n is a, c, g, or t
  misc_feature (127)..(127): n is a, c, g, or t
  misc_feature (128)..(128): n is a, c, g, or t
  misc_feature (129)..(129): n is a, c, g, or t
  misc_feature (273)..(273): n is a, c, g, or t
  misc_feature (337)..(337): n is a, c, g, or t
  misc_feature (365)..(365): n is a, c, g, or t
  misc_feature (396)..(396): n is a, c, g, or t
  misc_feature (457)..(457): n is a, c, g, or t
  misc_feature (460)..(460): n is a, c, g, or t
  misc_feature (468)..(468): n is a, c, g, or t
ccaacgcaaattcgcaaactttcttaaaacattatgagttncnntttgctatttttttttttttttttagctcatcggctatcgttagtgctagtggattttacatgtggcccnnnannnnnnnncnnncaacgtggcccagagaagccaaaagattggatacgcatcagacagatggaaaagggagattcagactgtttttcagggaggtggctgggtttacacgctaatcccgattcaccctgtccaaactgcctaagccctccgccattntcaagccctgcagtcacagctacacagatcacagcttcagccaggagctgggcagaaggccaanaggctgttcccaccaggctgctcagggntggtcttttaggacccttcccttgagccctntatggtgtggcaaagccttcattgccttaactggagccccatcagctccagctgctctgtnttntttgcccncaatgctttgcccctgagacaaatggaggcctgtcctgacctgtctcaccatgtacatagctt

SEQ ID NO: 660 - DNA, 436 bp, Homo sapiens
  misc_feature (1)..(436): 214651_s_at
gtgattcaaacttctgtgtactgggtgatgcacccattgtgattgtggaagatagaattcaatttgaactcaggttgtttatgaggggaaaaaaacagttgcatagagtatagctctgtagtggaatatgtcttctgtataactaggctgttaacctatgattgtaaagtagctgtaagaatttcccagtgaaataaaaaaaaattttaagtgttctcggggatgcatagattcatcattttctccaccttaaaaatgcgggcatttaagtctgtccattatctatatagtcctgtcttgtctattgtatatataatctatatgattaaagaaaatatgcataatcagacaagcgtaatgcataatcagacaagcttgaatattgtttttgcaccagacgaacagtgaggaaattcggagctatacatatgtgcag

SEQ ID NO: 661 - DNA, 312 bp, Homo sapiens
  misc_feature (1)..(312): 214657_s_at
ttctcggagaagttcttagcctgatgaaataacttggggcgttgaagagctgtttaattttaaatgccttagactggggatatattagaggaagcagattgtcaaattaagggtgtcattgtgttgtgctaaacgctgggagggtacaagttggtcattcctaaatctgtgtgtgagaaatggcaggtctagtttgggcattgtgattgcattgcagattactaggagaagggaatggtgggtacaccggtagtgctcttttgttcttgcttcgtttttttaaacttgaactttacttcgttagatttcata

SEQ ID NO: 662 - DNA, 519 bp, Homo sapiens
  misc_feature (1)..(519): 214696_at
  misc_feature (118)..(118): n is a, c, g, or t
  misc_feature (125)..(125): n is a, c, g, or t
  misc_feature (133)..(133): n is a, c, g, or t
  misc_feature (136)..(136): n is a, c, g, or t
gagtatacatcggtgcaggcttcctggatgacagttgggtgatatgtgtcatgtggcctaaaagcctccatgtcatttgacctacgaattctatctttgggaatttatcctaagaaantacttanggatttanttngtgataagatgttcatcccagcattgcaatggagaaaaatgggaagcaatggtttggttgggaatttattccttttctgctgtaacgaaagtttgcaataggggattgcttaagtaaattattgtatctccatccagatggtggagtaccgcgcagacattaaaagtcatgtaaaagaacatctgactgaaagaaaaatgctccttgaatattaaaaggttgtaaaaatagtgcatgttatgtgatttcaattttgttttttaaaatatgggtgtatgcttgtatacgtagagcagataaaaaagacggaaggcatactaaaaaatgttgagtggttatctttgtatggtggaacaaagtcactgtaattttcatctttggtt

SEQ ID NO: 663 - DNA, 262 bp, Homo sapiens
  misc_feature (1)..(262): 214714_at
taagtgtgaagaatgcgagaagagcttcaaacagcgctctgacctctttaaacaccacagaatccacactggggagaagccctatggatgttccgtctgtgggaaacgcttcaatcagagtgcaaccctcattaaacaccagagaattcacactggggaaaagccttacaaatgtcttgaatgtggggaaagatttagacaaagtacacaccttatccgacaccaaagaattcatcaaaataaagtgctgtcggctgggcgt

SEQ ID NO: 664 - DNA, 513 bp, Homo sapiens
  misc_feature (1)..(513): 214945_at
  misc_feature (89)..(89): n is a, c, g, or t
  misc_feature (104)..(104): n is a, c, g, or t
  misc_feature (122)..(122): n is a, c, g, or t
  misc_feature (161)..(161): n is a, c, g, or t
  misc_feature (164)..(164): n is a, c, g, or t
  misc_feature (165)..(165): n is a, c, g, or t
  misc_feature (166)..(166): n is a, c, g, or t
  misc_feature (167)..(167): n is a, c, g, or t
  misc_feature (430)..(430): n is a, c, g, or t
  misc_feature (431)..(431): n is a, c, g, or t
cacattacttcttttggcataatttaaattgtaagacatcattcacatttatcaatgttacatatataagaactcacccaccatattcntccttgaggaattanagcatgtaattctataancatttttataatcgtctaacaattttataatggattggntgnnnnctatcaattttttaaaagtcatggcttctccagtcatttcttgcttatcgaaattatttcatgagatgggtctctccttgtatatttgaaaatgaggtttgcttccttctacttaaaaaacaacttgaacatacctgtttggatcacatggtcttgtcctgataacttggaagaggttgcttcagcattgttcttattgttgtggtggttattattaatattgtttcatattctgtttaaaaaattaaaattttacacaagannaatgtcttcttttcaattccagtacatttttcagaagtaactaatgctattggctttgtgcattgtaatttcagaccatttt

SEQ ID NO: 665 - DNA, 474 bp, Homo sapiens
  misc_feature (1)..(474): 215047_at
  misc_feature (155)..(155): n is a, c, g, or t
  misc_feature (165)..(165): n is a, c, g, or t
  misc_feature (170)..(170): n is a, c, g, or t
  misc_feature (171)..(171): n is a, c, g, or t
  misc_feature (177)..(177): n is a, c, g, or t
  misc_feature (184)..(184): n is a, c, g, or t
  misc_feature (187)..(187): n is a, c, g, or t
  misc_feature (193)..(193): n is a, c, g, or t
  misc_feature (194)..(194): n is a, c, g, or t
  misc_feature (203)..(203): n is a, c, g, or t
  misc_feature (208)..(208): n is a, c, g, or t
  misc_feature (212)..(212): n is a, c, g, or t
  misc_feature (221)..(221): n is a, c, g, or t
  misc_feature (230)..(230): n is a, c, g, or t
  misc_feature (231)..(231): n is a, c, g, or t
  misc_feature (232)..(232): n is a, c, g, or t
  misc_feature (236)..(236): n is a, c, g, or t
  misc_feature (242)..(242): n is a, c, g, or t
  misc_feature (254)..(254): n is a, c, g, or t
  misc_feature (263)..(263): n is a, c, g, or t
  misc_feature (275)..(275): n is a, c, g, or t
  misc_feature (284)..(284): n is a, c, g, or t
gacatggcaattcttaaattgattcagaatggtctgatactattccagtatcacctccttaattctgtttctcctcgttttcctgattttccttctcattctctccttccccgctctgtctctctctccctgtcactctctctctctcgttcctntattttttgntttcnnttaccntcttacntgntttaanncctgttgcnttccnttcntggattaantacatttannngccnattccntttatatggtcnacatttccntatgactttacntcaattacnttttaaaatcctttctattctgagactaatttttaagaattacaaagctcattcttctgaatctaatatcactaactcctagactttttccgttttctttggatacactttaagtaggaatttatcagaattttcattcaactcgttctttaatgcagatatttactagttataagaccttaaggctggg

SEQ ID NO: 666 - DNA, 558 bp, Homo sapiens
  misc_feature (1)..(558): 215111_s_at
acaatagtactgtgcctctttcttctcaaacaatggatgacacaaaactatgagagtgacaaaatggtgacaggtagctgggacctaggctatcttaccatgaaggttgttttgcttattgtatatttgtgtatgtagtgtaactattttgtacaatagaggactgtaactactatttaggttgtacagattgaaatttagttgtttcattggctgtctgaggaggtgtggacttttatatatagatctacataaaaactgctacatgacaaaaaccacacctaaagaaattttaagaatttggcacagttactcactttgtgtaatctgaaatctagctgctgaatacgctgaagtaaatccttgttcactgaagtctttcaattgagctggttgaatactttgaaaaatgctcagttctaactaatgaaatggatttcccagtaggggtttctgcatatcacctgtatagtagttatatgcatatgtttctgtgcatgttctctacacaattgtaaggtgtcactgtatttaactgttgcacttgtcaactttcaa

SEQ ID NO: 667 - DNA, 518 bp, Homo sapiens
  misc_feature (1)..(518): 215182_x_at
ccctctggttgtgtggccagcatgtttttctagccaaaggacttgggatgagatttttcatggaatattgagagagacgtaattgttattagaatcagttctgtttttatttattattattatttgaaacagagtctcactctgtcgcccaggctggagtgtactgtcacaatcttggctcactgcaacctccgcctcccaggttcaagcaatcctcctgcctcagcctcccgagtagccgggattacaggcgcgtgccgccatgcccggctaatttttgtatttttagtagagatggggttttgtcatgttggccaggctggtctcaaaaactcctgacctcaggtgatccgcccaccttggcctcccaaagtgctgggattacatgcttgagctaccatacctggctaatttttgtatttttagtagagatggggttttgccatgttggctgggctggtcttgaactcctgatttcaggtgatccacttgcctcgacctcccaaagtgctagaatt

SEQ ID NO: 668 - DNA, 383 bp, Homo sapiens
  misc_feature (1)..(383): 215223_s_at
  misc_feature (147)..(147): n is a, c, g, or t
  misc_feature (154)..(154): n is a, c, g, or t
  misc_feature (155)..(155): n is a, c, g, or t
  misc_feature (159)..(159): n is a, c, g, or t
  misc_feature (172)..(172): n is a, c, g, or t
  misc_feature (228)..(228): n is a, c, g, or t
acctcagccctaacggtggtggagaacccaaaggggagttgctggaagccatcaaacgtgactttggttcctttgacaagtttaaggagaagctgacggctgcatctgttggtgtccaaggctcaggttggggttggcttggtttcnaataagnnaacnggggacacttacnaaattgctgcttgtccaaatcaggatccactgcaaggaacaacaggccttattccnactgctggggattgatgtgtgggagcacgcttactaccttcagtataaaaatgtcaggcctgattatctaaaagctatttggaatgtaatcaactgggagaatgtaactgaaagatacatggcttgcaaaaagtaaaccacgatcgttatgctga

SEQ ID NO: 669 - DNA, 359 bp, Homo sapiens
  misc_feature (1)..(359): 215285_s_at
cactcagggaccaaacgtgaccccaaagaggatgtttttcagcagaatcatttattctggcttcagaattcaagtccttcctctgatcgagttagtgcaataatctgggaggggaatgagtgcaaaaagatggatatgtctgtgttggaaataagtggcatcatcatgagcagggtcaatgcctatcagcaaggagtaggttatcagatgctgggaaatgttgtcactattggattagcattttttccattcttacatcgacttttccgtgagaagagccttgaccaactaaagtccatttcagctgaggagatcttgactctcttttgtggggcaccacctgttacacctattattgt

SEQ ID NO: 670 - DNA, 496 bp, Homo sapiens
  misc_feature (1)..(496): 215382_x_at
  misc_feature (150)..(150): n is a, c, g, or t
  misc_feature (151)..(151): n is a, c, g, or t
  misc_feature (345)..(345): n is a, c, g, or t
  misc_feature (347)..(347): n is a, c, g, or t
  misc_feature (348)..(348): n is a, c, g, or t
  misc_feature (366)..(366): n is a, c, g, or t
  misc_feature (405)..(405): n is a, c, g, or t
  misc_feature (428)..(428): n is a, c, g, or t
ccggtcagcaggatcatcgtgcacccacagttctacatcatccagactggagcggatatcgccctgctggagctggaggagcccgtgaacatctccagccgcgtccacacggtcatgctgccccctgcctcggagaccttccccccgggnntgccgtgctgggtcactggctggggcgatgtggacaatgatgagcccctcccaccgccatttcccctgaagcaggtgaaggtccccataatggaaaaccacatttgtgacgcaaaataccaccttggcgcctacacgggagacgacgtccgcatcatccgtgacgacatgctgtgtgccgggaacacccggagngnntcatgccagggcgactcnggagggcccctggtgtgcaaggtgaatggcacctggctncaggcgggcgtggtcagctgggncgagggctgtgcccagcccaaccggcctggcatctacacccgtgtcacctactacttggactggatcc

SEQ ID NO: 671 - DNA, 540 bp, Homo sapiens
  misc_feature (1)..(540): 215416_s_at
atcaaggatatccatgtgccaccccgggtgaaagagtctatgcagatgcaggtgggggccaaggaggggtgggaaaagggcctcagggctccagtggaggcagagcggcggaaacgggccacagttctagagtctgaggggacccgagagtcggccatcaatgtggcagaagggaagaaacaggcccagatcctggcctccgaagcagaaaaggctgaacagataaatcaggcagcaggagaggccagtgcagttctggcgaaggccaaggctaaagctgaagctattcgaatcctggctgcagctctgacacaacataatggagatgcagcagcttcactgactgtggccgagcagtatgtcagcgcgttctccaaactggccaaggactccaacactatcctactgccctccaaccctggcgatgtcaccagcatggtggctcaggccatgggtgtatatggagccctcaccaaagccccagtgccagggactccagactcactctccagtgggagcagcagagatgtccagggtaca

SEQ ID NO: 672 - DNA, 481 bp, Homo sapiens
  misc_feature (1)..(481): 215537_x_at
ctcgcactgttgtggcaggcagcagcgacgctgcccaaaaggctgtccgggcaatggcagtgctgacagatcacccatatgcctccctgaccctcccagatgacgcagctgctgactgtctctttcttcgtcctgggttgcctggtgtgccccctttcctcctgcaccgtggaggtggggatctgcccaacagccaggaggcactgcagaagctctctgatgtcaccctggtacctgtgtcctgctcagaactggagaaggctggcgccgggctcagctccctctgcttggtgctcagcacacgcccccacagctgagggcctggccttggggtactgctggccaggggtaggatagtataggaagtagaaggggaaggagggttagatagagaatgctgaataggcagtagttgggagagagcctcaatattgggggaggggagagtgtagggaaaaggatccactgggtgaatcctccc

SEQ ID NO: 673 - DNA, 121 bp, Homo sapiens
  misc_feature (1)..(121): 215666_at
gaaaaatccgtggaactgaagctgagatctttagtacgtggagtcaccttacagatacagagcatttatgcggtattcattggtgcctaaagaactttaggcatcctctggaaaaccggcc

SEQ ID NO: 674 - DNA, 384 bp, Homo sapiens
  misc_feature (1)..(384): 215785_s_at
  misc_feature (208)..(208): n is a, c, g, or t
atcattaagaatgtgcccctgaagaagatggccgaccggatcaggaagtatcagatcttgaacaatgaggtttttgccatcctgaacaaatacatgaagtccgtggagacagacagttccactgtggagcatgtgcgctgcttccagccacccatccaccagtccttggccaccacttgctaagcagaagatcctgcagacccttatntggaggaggaagagaagcaggagagagaaagccacagccagcctgccataggatccaactggacaacgtgtgggatggacctggaaacaagcacctccccaaacacatcaccactccctagggcggggcctgtgcatgctctcccatgacatctccatgctggtttctccatagca

SEQ ID NO: 675 - DNA, 545 bp, Homo sapiens
  misc_feature (1)..(545): 216054_x_at
tggactttgagacgttcttgcccatcctgcagcacatttcccgcaacaaggagcagggcacctatgaggacttcgtggagggcctgcgtgtctttgacaaggagagcaatggcacggtcatgggtgctgagcttcggcacgtccttgccaccctgggagagaagatgactgaggctgaagtggagcagctgttagctgggcaagaggatgccaatggctgcatcaattatgaagcctttgtcaagcacatcatgtcagggtgaagcagagtcttccaggtgcctggcccttggctttagccataccagggtgagttaaagagaggccccggctgggtgagctgagatggagtcctcgacttatcaccacaccactgccccaaggaccttacaggccctccctgttaataaacagctctaacacggccaggctgggctctgggattctgagaccgcaagaccaacccttcctcctcctcagcctactcaacctgaagacaaggaagatgaaggccttgaagattatccacttccacttactagtaa

SEQ ID NO: 676 - DNA, 513 bp, Homo sapiens
  misc_feature (1)..(513): 216153_x_at
tttccgttttcttggacatcaggattctcttgcaggcattttggcaagcatggtcttcagctctgtcacagcaatataaacctacattttcagaatataagtggcttaattagctgttttttttgtttgtttttattgtactttaagttctgggatacatgtgcagaatgtgcagatttgttacataggtatacacatgccatggtggtttgctgaacccatcaacctgtcatctacattaggtatttctcctaatgctatccctcccctagcccccaactccctgacaggccctggtgtgtgatgttcccctccctgtgtccatgtgttctcatagttcaactcccacttatgagtgagaacatgcagtattttgttttctgttcttgtgttagtttgctgagaatgatggtttccagcttcatccatgtccctgcaaaggacatgaactcatccttttttatggctgcatagtattccacggtgtagatgtgccacattttctttattcag

SEQ ID NO: 677 - DNA, 366 bp, Homo sapiens
  misc_feature (1)..(366): 216191_s_at
gaaaaggaacccgtgtgactgtggaaccaagaagtcagcctcataccaaaccatccgtttttgtcatgaaaaatggaacaaatgtcgcttgtctggtgaaggaattctaccccaaggatataagaataaatctcgtgtcatccaagaagataacagagtttgatcctgctattgtcatctctcccagtgggaagtacaatgctgtcaagcttggtaaatatgaagattcaaattcagtgacatgttcagttcaacacgacaataaaactgtgcactccactgactttgaagtgaagacagattctacagatcacgtaaaaccaaaggaaactgaaaacacaaagcaaccttcaaagagctgccata

SEQ ID NO: 678 - DNA, 158 bp, Homo sapiens
  misc_feature (1)..(158): 216202_s_at
gttcacaaagagttttggtgcttctggaggatatattggaggcaagaaggagctgatagactacctgcgaacacattctcatagtgcagtgtatgccacgtcattgtcacctcctgtagtggagcagatcatcacctccatgaagtgcatcatggggc

SEQ ID NO: 679 - DNA, 297 bp, Homo sapiens
  misc_feature (1)..(297): 216295_s_at
  misc_feature (127)..(127): n is a, c, g, or t
gaagaagcctttgtaaatgacattgacgagtcgtccccaggcactgagtgggaacgggtggcccggctgtgtgactttaaccccaagtctagcaagcaggccaaagatgtctcccgcatgcgctcangtcctcatctccctcaagcaggccccgctggtgcactgaagagcaccctgtggaaacactacatctgcaatatcttaatcctactcagtgaagctcttcacagtcattggattaattatgttgagttcttttggaccaaacctttttgtctttagagttgttcattgttt

SEQ ID NO: 680 - DNA, 399 bp, Homo sapiens
  misc_feature (1)..(399): 216379_x_at
tcacaaacttttatactctttctgtatatacattttttttctttaaaaaacaactatggatcagaatagccacatttagaacactttttgttatcagtcaatatttttagatagttagaacctggtcctaagcctaaaagtgggcttgattctgcagtaaatcttttacaactgcctcgacacacataaacctttttaaaaatagacactccccgaagtcttttgttcgcatggtcacacactgatgcttagatgttccagtaatctaatatggccacagtagtcttgatgaccaaagtcctttttttccatctttagaaaactacatgggaacaaacagatcgaacagttttgaagctactgtgtgtgtgaatgaacactcttgctttattccagaat

SEQ ID NO: 681 - DNA, 358 bp, Homo sapiens
  misc_feature (1)..(358): 216474_x_at
ccgccatttcctctgaagcaggtgaaggtccccataatggaaaaccacatttgtgacgcaaaataccaccttggcgcctacacgggagacgacgtccgcatcgtccgtgacgacatgctgtgtgccgggaacacccggagggactcatgccagggcgactccggagggcccctggtgtgcaaggtgaatggcacctggctgcaggcgggcgtggtcagctggggcgagggctgtgcccagcccaaccggcctggcatctacacccgtgtcacctactacttggactggatccaccactatgtccccaaaaagccgtgagtcaggcctgggttggccacctgggtcactggaggaccaa

SEQ ID NO: 682 - DNA, 273 bp, Homo sapiens
  misc_feature (1)..(273): 216491_x_at
agtcgggcccaggactggtgaagccttcggagaccctgtccctcacctgcactgtctctggtggctccatcagtagttactactggagctggatccggcagcccgccgggaagggactggagtggattgggcgtatctataccagtgggagcaccaactacaacccctccctcaagagtcgagtcaccatgtcagtagacacgtccaagaaccagttctccctgaagctgagctctgtgaccgccgcggacacggccgtgtattactgtgcga

SEQ ID NO: 683 - DNA, 554 bp, Homo sapiens
  misc_feature (1)..(554): 216554_s_at
cagcttgcacgcctgaagagactcggtcacggagccaatctggttgactttgagcaggaggcagttgcaggacttctcgttcacggccttggcgatcctctttgggttggtcactgtgagatcatcccccactacctggattcctgcactggctgtgaacttctgccaagctccccagtcatcctggtcaaagggatcttcgatagacaccactgggtagtccttgatgaaggacttgtacaggtcagccagctggtcaggcgagatgtacctgctggggtcatcgggagacttgaagtccaggtcatacttcccagacctgaagaactcggaggccgctacgtccatgccgatgaccaccttatcagtgtagccagctttcccaatagcagtcttcagcagctccaggccttctttattctccaggatgttgggagcaaacccgccttcatcccccacattggtggcatctttcccatatttctccttgatgacattcttcaggttgtggtaaacctctgctccaatgcgcatggcttccctgaagtttgctg

SEQ ID NO: 684 - DNA, 519 bp, Homo sapiens
  misc_feature (1)..(519): 216667_at
tcaggggtttgacgtccatcagtaggaaccagctccaatgcaccaatgcaatgcgggtaattaacaattatcaacggcgatggaaaaaccgaaatacttttcttcttgcaacttttgctaatgtagttaatgtttgtggtaacccaactataacctgccctcataacagaactctcaacaattgtcatcatagtggagtccaggtgcctttaatgtactgtaacctcacaactccaagtccacagaatatttcaaactgcaggtatgcgcagacaccagcaaacatgttctatatagttgcatgtgacaacagggatcaacgacgggaccctccacagtatccagtggttccagttcacctgcataccatcatctaagctcctgtatcagcactcctcatcatcactcatctgccaagctcctcaatcatagccaagatcccatccctccatgtactctgggtgtcagcatctgtcctcttcagtctctataccccttccacttgcctgagctgaagtg

SEQ ID NO: 685 - DNA, 521 bp, Homo sapiens
  misc_feature (1)..(521): 216705_s_at
gagcgagacttcggggtcaaggcccggtccatcctgtgctgcatgcgccaccagcccatcttgcctggacatgtccaggcctaccaggaggctgtgaagagcggcattcaccgtactgtccacgccggggaggtgggctcggccgaagtagtaaaagaggctgtggacatactcaagacagagcggctgggacacggctaccacaccctggaagaccaggccctttataacaggctgcggcaggaaaacatgcacttcgagatctgcccctggtccagctacctcactggtgcctggaagccggacacggagcatgcagtcattcggctcaaaaatgaccaggctaactactcgctcaacacagatgacccgctcatcttcaagtccaccctggacactgattaccagatgaccaaacgggacatgggctttactgaagaggagtttaaaaggctgaacatcaatgcggccaaatctagtttcctcccagaagatgaaaagagggagcttctcgacctgct

SEQ ID NO: 686 - DNA, 224 bp, Homo sapiens
  misc_feature (1)..(224): 216833_x_at
gagcatatcagcatggagtacctctggtgtggcaatgcacacttcaacctcctcttcggtcacaaagagttacatctcatcacagacaaatggagaaatgggacaacttgtccatcgtttcactgtaccaggcatgaggatgtggcctgcatgctgcctgatcttgcctagaaccggctgcacctgctgttctcttgtttatgcaaactggctgcacctgctat

SEQ ID NO: 687 - DNA, 356 bp, Homo sapiens
  misc_feature (1)..(356): 216834_at
atgaaactgattacaacaggctgtaagaatcaaagtcaactgacatctatgctacatattattatatagtttgtactgagctattgaagtcccattaacttaaagtatatgttttcaaattgccattgctactattgcttgtcggtgtattttattttattgtttttgactttggaagagatgaactgtgtatttaacttaagctattgctcttaaaaccagggatcagaatatatttgtaagttaaatcattggtgctaataataaatgtggattttgtattaaaatatatagaagcaatttctgtttacatgtccttgctacttttaaaaacttgcatttattcctcagatttt

SEQ ID NO: 688 - DNA, 366 bp, Homo sapiens
  misc_feature (1)..(366): 217023_x_at
ccggtcagcaggatcatcgtgcacccacagttctacaccgcccagatcggagcggacatcgccctgctggagctggaggagccggtgaacgtctccagccacgtccacacggtcaccctgccccctgcctcagagaccttccccccggggatgccgtgctgggtcactggctggggcgatgtggacaatgatgagcgcctcccaccgccatttcctctgaagcaggtgaaggtccccataatggaaaaccacatttgtgacgcaaaataccaccttggcgcctacacgggagacgacgtccgcatcgtccgtgacgacatgctgtgtgccgggaacacccggagggactcatgccaggtggcgact

SEQ ID NO: 689 - DNA, 260 bp, Homo sapiens
  misc_feature (1)..(260): 217226_s_at
cctgttccactgacatttcttagacattcagcaaaacccccaccttaacctcttttctttcttgagggttggtcctgtccccacctccaccctcccaccccctggaagaggaagggcccgggcatcagtggctagtccaaataaaatatgggcttggggatggaatgggtggtggtaagttcacagagtgtagttagatcccaactcccatgacctctggcttcagtggtgggtggggcagggcagatgaaagggcttca

SEQ ID NO: 690 - DNA, 546 bp, Homo sapiens
  misc_feature (1)..(546): 217274_x_at
gtccttgccaccctgggagagaagtcattgtttgaccggaccccgactggagagatgaagatcacctacatgactgaggctgaagtggagcagctgttagctgggcaagaggatggccagtgcggggatgtactgcgggccctgggccagaaccctaccgccaatggctgcatcaattatgaagcctttgtcaagcacatcatgaatgccgaggtgctgcgtgtgctgggcaagcccaagcctgaagagtcagggtgaagcagagtcttccaggtgcctgcccttggctttagccataccagggtgagttaaagagaggcccggctgggtgagctgagatggagtcctcgacttatcaccacaccactgccccaaggacttacaggccctccctgttaataaacagctctaacacggccaggctgggctctgtgaagcagagtcttccaggaccgcaagaccaacccttcctcctcctcagcctactcaacctgaagacaaggaagatgaaggccttgaagattatccacttccacttactagtaa

SEQ ID NO: 691 - DNA, 338 bp, Homo sapiens
  misc_feature (1)..(338): 217294_s_at
gcttttgcagtcgtgtaatgggcccaagtcattgtttttctcgcctcactttccaccaagtgtctagagtcatgtgagcctcgtgtcatctccggggtggccacaggctagatccccggtggttttgtgctcaaaataaaaagcctcagtgacccatgagacggagatctcgccggctttacgttcacctcggtgtctgcagcaccctccgcttcctctcctaggcgacgagacccagtggctagaagttcaccatgtctattctcaagatccatgccagggagatctttgactctcgcgggaatcccactgttgaggttgatctcttcacctcaaaa

SEQ ID NO: 692 - DNA, 256 bp, Homo sapiens
  misc_feature (1)..(256): 217378_x_at
gatgtgacatccaggtgacccagtctccatcttccctgtctgcgtctgtaggagacagagtcaccatcacctgccgggcaagtcagggcattagcaatgggttatcctggtatcagcagaaaccagggcaagcccctacgctcctgatctatgctgcatccagtttgcagtcgggggtcccatctcggttcagtggcagtggatctgggacagatttcactctcaccatcagcagcctgcagcctgaagatgttgc

SEQ ID NO: 693 - DNA, 496 bp, Homo sapiens
  misc_feature (1)..(496): 217591_at
  misc_feature (418)..(418): n is a, c, g, or t
tttccctcccttaaaatggcatagctgagaaagccccggtactactaattgagatgatctgcttaagagtcttcatattctgaactcgaaaggccttttatgttatattattgctcgctttacgcaactccaaattgctttcctatttaaatgaatgttcttctagtaaactggtgttagatttaaagaaatcactcaagcttcaccttggtaaactgaactcagtttaagattaagaaactgatttcggccgggtgcggtggctcacgcctgtaattccagcactttgggaggcccgggcgggcggatcacctgaggtcaggagttcaagaccagcctgactaatatggtgaaaccccgtttctactaaaaatacaaaaaaattagccgggtgtcgtggcttgtgcctgtagtcccngctactccggagtctgagacaggaaaattgcttgaacccgggaggcggaggttgcagtatgccgagatcgctgcactt

SEQ ID NO: 694 - DNA, 524 bp, Homo sapiens
  misc_feature (1)..(524): 217724_at
agttacctactattctgacattttaggaaggaggtaattgtttttaatgatggataaacttgtgctggtgttttggatcttatgatgctgagcatgttctgcactggtgctaatgtctaatataattttatatttacacacatacgtgctacccagagattaatttagtccatatgaactattgacccattgttcattgagacagcaacatacgcactcctaaatcagtgtgtttagacttttcaagtatctaactcatttccaaacatgtaccatgttttataaacctcttgatttccagcaacatactatagaaaacacctgctactcaaaacacaacttctcagtgtcatccattgctgtcgtgagagacaacatagcaatatctggtatgttgcaagctttcaagatagcctgaacttaaaaagttggtgcattagttgtatctgatggatataaatttgcctcctagttcactttgtgtcaagagctaaaactgtgaacctaactttctcttattggtg

SEQ ID NO: 695 - DNA, 507 bp, Homo sapiens
  misc_feature (1)..(507): 217739_s_at
aaattaccatgattgctttatgtttatatttaacttgtatttttgtacaaacaagattgtgtaagatatatttgaagtttcagtgatttaacagtctttccaacttttcatgatttttatgagcacagactttcaagaaaatacttgaaaataaattacattgccttttgtccattaatcagcaaataaaacatggccttaacaaagttgtttgtgttattgtacaatttgaaaattatgtcgggacataccctatagaattactaaccttactgccccttgtagaatatgtattaatcattctacattaaagaaaataatggttcttactggaatgtctaggcactgtacagttattatatatcttggttgttgtattgtaccagtgaaatgccaaatttgaaaggcctgtactgcaattttatatgtcagagattgcctgtggctctaatatgcacctcaagattttaaggagataatgtttttagagagaatttctgcttccac

SEQ ID NO: 696 - DNA, 454 bp, Homo sapiens
  misc_feature (1)..(454): 217784_at
  misc_feature (204)..(204): n is a, c, g, or t
  misc_feature (217)..(217): n is a, c, g, or t
  misc_feature (227)..(227): n is a, c, g, or t
gaccagagtctcagtggtcctgacccccaatgtgggcaggggctgggcaggagggtggggtctgctgtgggttcagaggactccacctcctggctggtttacctgctgctgcccattttctctgggtactgctggccagaggactttagcctacccctgaagagcctgtccatgtcattttcctactgccatagataccctaangcccagggccccnttgaggcccnagactcagcctgcccactggtgccggagacggagtggagtgggcctggatccgagggatgctacctctccctttcccacttgaggaccctggggagagatgggggcggggaaaatggaggtatgaatttggggtaagaggaagtgagatctccgcttgcaggtcagcccctgccttgcagggcgggctggcttgactcaggccctgtgagatagagggcccagccca

SEQ ID NO: 697 - DNA, 530 bp, Homo sapiens
  misc_feature (1)..(530): 217791_s_at
cactcgcttttctgatggttaccgctttggactgggagctgaagtgggaatcagtacatcgagaatccacgcccggggaccagtaggacttgagggactgcttactactaagtggctgctgcgagggaaggaccacgtggtctcagatttctcagagcatggaagtttaaaatatcttcatgagaacctccctattcctcagagaaacaccaactgaaaagagccaggaaaacccgggaattttccaaaaggtcttcacgttaaacttgtcttatctcaggagagagcccgctcttgtctcccagttcctggtagggtctgcctgttggaaagtgtacctggatgcttctgggctccgtttggcaatagcaatcttggctgatgtgcacagtctggctcccagctcaccctttttttttaaagtaagaaaatagttgctaccgatagggactttgccaagtccaattatcttctaggattgaaaggtgcattttccccataaaaaaggcgaggaaaacccatggctgctt

SEQ ID NO: 698 - DNA, 376 bp, Homo sapiens
  misc_feature (1)..(376): 217809_at
gcacaatacctaggttaccacacaccactttttgattgggaatgctgaaccatttgagaagagaaacttggcttctgttttcgcaaaggaaaaaaaaaataggataggcttcccttgtgcagagggagaaatggttttgtttttgttttgtttttaaatggagccctgaggcatcagctattatacttgggactctacctctcactcactatatgctaacttaaagccattcaacaaggagtcaagtagatctgaaattaaatactcaacagactcctccttttttagctgtatttttcaggtactgtgtggtgaccgccccactggtgtctattacaggccactttggtagttgtgtatctgctcatgtatgtga

SEQ ID NO: 699 - DNA, 371 bp, Homo sapiens
  misc_feature (1)..(371): 217838_s_at
gatcatcgacgccatcaggcaggagctgagtgggatcagcaccacgtaaggggccggcctcgctgcgctgattcgtcgagcccatccggcgacagaggacagccagaagcccagccagccccagactccagtgcaccagagcacgcacaggagcctgggcgcgctgctgtgaaacgtcctgacctgtgatcacacatgacagtgaggaaaccaagtgcaactcctgggtttttttagattctgcctgacacggaacaccaggtctgctcgtcttttttgtgttttatatttgcttatttaaggtacatttctttgggtttctagagacgcccctaagtcacctgcttcattagacggtttccaggttttct

SEQ ID NO: 700 - DNA, 352 bp, Homo sapiens
  misc_feature (1)..(352): 217871_s_at
cttctgccatcatgccgatgttcatcgtaaacaccaacgtgccccgcgcctccgtgccggacgggttcctctccgagctcacccagcagctggcgcaggccaccggcaagcccccccagtacatcgcggtgcacgtggtcccggaccagctcatggccttcggcggctccagcgagccgtgcgcgctctgcagcctgcacagcatcggcaagatcggcggcgcgcagaaccgctcctacagcaagctgctgtgcggcctgctggccgagcgcctgcgcatcagcccggacagggtctacatcaactattacgacatgaacgcggccaatgtgggctggaacaactccacctt

SEQ ID NO: 701 - DNA, 556 bp, Homo sapiens
  misc_feature (1)..(556): 217892_s_at
atctgctgtctcccaaataagcttttgtatctgccagtgaatttactgtactccaaatgattgctttcttttctggtgatatctgtgcttctcataattactgaaagctgcaatattttagtaataccttcgggatcactgtcccccatcttccgtgttagagcaaagtgaagagtttaaaggaggaagaagaaagaactgtcttacaccacttgagctcagacctctaaaccctgtatttcccttatgatgtcccctttttgagacactaatttttaaatacttactagctctgaaatatattgatttttatcacagtattctcagggtgaaattaaaccaactataggcctttttcttgggatgattttctagtcttaaggtttggggacattataaacttgagtacatttgttgtacacagttgatattccaaattgtatggatgggagggagaggtgtcttaagctgtaggcttttctttgtactgcatttatagagatttagctttaatattttttagagatgtaaaacattctgctttcttagtcttacc

SEQ ID NO: 702 - DNA, 495 bp, Homo sapiens
  misc_feature (1)..(495): 217942_at
tttccccacaagctggcatttcagtagttgcttttgaataatggttttggttacctgggaaggcaggcccagaacccatttccttgacttgcagttccgggctgtgttcacatgactgctgtctagctgatgcatttttcacatttgtcaactctggttagaaacaggtcctcaggagtattctctaacctgatattttctaaaaagatatgttgattcaactttgtttagcatcctactttctagattgtggggctcattttgccagggccaagctaccagaaaagtagaagtggagattacctggtatgtatctctctgggtgccccagttagagctgccacagctcaggaaaaagatgaggcataacgaccttgaatgtaattggagtaagtgacaaaataagaactaccctgggaaaccctgcattcaatgtagctgtcaattcagtatttttaagtacacctgtcagctgtttcttaccacttcgatggt

SEQ ID NO: 703 - DNA, 367 bp, Homo sapiens
  misc_feature (1)..(367): 217949_s_at
gctattgttaggttgcctgcggacacgctgggcctctgtcctgatgctgctgagctccctggtgtctctcgctggttctgtctacctggcctggatcctgttcttcgtgctctatgatttctgcattgtttgtatcaccacctatgctatcaacgtgagcctgatgtggctcagtttccggaaggtccaagaaccccagggcaaggctaagaggcactgagccctcaacccaagccaggctgacctcatctgctttgctttggcatgtgagccttgcctaagggggcatatctgggtccctagaaggccctagatgtggggcttctagattaccccctcctcctgccatacccgcacatgacaatgg

SEQ ID NO: 704 - DNA, 499 bp, Homo sapiens
  misc_feature (1)..(499): 217986_s_at
  misc_feature (47)..(47): n is a, c, g, or t
gtattggatacagtactggtttacagaggtttttgtacatttttganatcattcatgtgtccagagatcttggaaaatattttttcacccacgatttattttgttattgatgatttatttttaaagtggtggtattaagggagagttatctacatggatgagtcttccgctatagcacagtttagaaaaggtgtttatgtcttaattaattgtttgagtacattctttcaacactacacatgaatgaatccaatcttataaccttgaagtgctgtaccagtgctggctgcaggtattaagtccaagtttattaactagatatttatttagtattgagagtaatttgtgaatttgttttgtatttataaaatttatacctggaaaatgttccttaatgttttaaaccttttactgtgtttttattcctctaacttccttaatgatcaatcaaaaaaagtaacaccctccctttttcctgacagttctttcagctttacag

SEQ ID NO: 705 - DNA, 436 bp, Homo sapiens
  misc_feature (1)..(436): 217988_at
gagcgcaatcgtcagtatcaaaagctccaaggcctctatgatagccttaggctacgaaacatcactattgctaaccatgaaggcacccttgaaccatccatgattgcacagtctggtgttcttggcttcccattaggtaacaactccaagtttcctttggataatacacctgttcgaaatcggggcgatggagatggagattttcagttcagaccattttttgcgggttctcccacagcacctgaacccagcaacagcttttttagttttgtctctccaagtcgtgaattagagcagcagcaagtttctagcagggccttcaaagtaaaaagaatttgagccacgcatagtgtcacgcacctgtgatcccagctacttaggaggttgaggctgggaggatcacttgagcccaggagtctgaggctttagtgatcta

SEQ ID NO: 706 - DNA, 505 bp, Homo sapiens
  misc_feature (1)..(505): 217993_s_at
tttatcattttgtttgtcctggctaaacttggagtttgagtatagtaaattatgatccttaaatatttgagagtcaggatgaagcagacctgctgtagacttttcagatgaaattgttcattctcgtaacctccatattttcaggatttttgaagctgttgaccttttcatgttgattattttaaattgtgtgaaatagtataaaaatcattggtgtacattatttgctttgcctgagctcagatcaaaatgtttgaagaaaggaactttatttttgcaagttacgtacagtttttatgcttgagatatttcaacatgttatgtatattggaacttctacagcttgatgcctcctgcttttatagcagtttatggggagcacttgaaagagcgtgtgtacatgtattttttttctaggcaaacattgaatgcaaacgtgtatttttttaatataaatatataactgtccttttcatcccatgttgccgctaagtgatatttcata

SEQ ID NO: 707 - DNA, 345 bp, Homo sapiens
  misc_feature (1)..(345): 218026_at
ttatggttacaccttctactcgatttcccaggagcgtttcctagatgagctagaagacgaggccaaagctgcccgagcccgagctctggcaagggcgtcagggtcctaatctggatgggtattgatcatgtccaacctgctggagccccttcacatggtggatgatgccccatgaccctgtagaaattgaatcctgctcacaacattgttggccttcttactaaccttggaccgtgattgagcccaagaaaccagggacttacgcatttggccaatgtcaaaagaacagaactttgcccactgcacacttgctgtgtacaatgactgagccctttcttgtagttt

SEQ ID NO: 708 - DNA, 464 bp, Homo sapiens
  misc_feature (1)..(464): 218027_at
tggtggtgttgttactacagccttctatgatccaagaagtctggacattgtatgcaaacctgttccattctttcttcgtggacaacccattccaaaaagaatgcttccaccagaagaactggtaccatattacactgatgcaaagaaccgtgggtacctggcggatcctgccaaatttcctgaagcacgacttgaactcgccaggaagtatggttatatcttacctgatatcactaaagatgaactcttcaaaatgctctgtactaggaaggatccaaggcagattttctttggtcttgctccaggatgggtggtgaatatggccgataagaaaatcctaaaacctacagatgaaaatctccttaagtattatacctcatgaattcccgtccaaggaagcagagttgttaaagagtactggaataggggctgaaggatctatattcccttattgcattttcctt

SEQ ID NO: 709 - DNA, 517 bp, Homo sapiens
  misc_feature (1)..(517): 218039_at
aactgcagtcttctgctagccaatagcatttacctgatggcagctagttatgcaagcttcaggagaatttgaacaataacaagaatagggtaagctgggatagaaaggccacctcttcactctctatagaatatagtaacctttatgaaacggggccatatagtttggttatgacatcaatattttacctaggtgaaattgtttaggcttatgtaccttcgttcaaatatcctcatgtaattgccatctgtcactcactatattcacaaaaataaaactctacaactcattctaacattgcttacttaaaagctacatagccctatcgaaatgcgaggattaatgctttaatgcttttagagacagggtctcactgtgttgcccaggctggtctcaaactccaccaaatgtacttcttattcattttatggaaaagactaggctttgcttagtatcatgtccatgtttccttcacctcagtggagcttctgagttttatactgctcaagatcgtcat

SEQ ID NO: 710 - DNA, 555 bp, Homo sapiens
  misc_feature (1)..(555): 218069_at
ggacattccctgtgactccacaggccagacctcaacctagaaagatggccacaggacttgcaactcagggtggtgtctgaagagcagagagtggcctggccctggagcctttttctagtcttttcagaatagatcatgggcctgaggcctccacttcttgaggtctgaggcccagcagcctctagaaggtagcctcctggtgtttgttctcccagtaaaatggttttgggcgataacttctagattattcctggatggccagggaggctctctgtctcagcaggtgatgacgggggtaccaggggtgcctctgagacccattctcgtgtttccctgttgtaccttttgcctgcagggcagagagatctggtttctagcaaattcccagtaggatgtcatgtaagttccttccccctcttagagattgaaggctgtaagagtccagatggtggagccaggctgtctgggttcaaatgccatctttgacacttgcaagctaaatgacattactcaaattaatcgttctgcacttcagcttccttgtctatcaaataa

SEQ ID NO: 711 - DNA, 522 bp, Homo sapiens
  misc_feature (1)..(522): 218078_s_at
tttctgatagttaacccccataaatgtgcacgtacctgtgtcttatctatattttaacctgggagactgttgtcctggcatggagatgaccatgatgctggggttacctcacagtccccaccctttcaaagttgacatatggccatcccattggccagaatccacagacacacctaagcctgtggcactgggacagaatagattttccatttgagaggcacttcctgtgtcagtcttgtttgaaggaggtggtgatggtggatagaggtgaaggaggtagggagtgccctccaagtgcaaaaataacaaatatgattattgaccatcggggaattctcacacattgatttgttttttaagcaattgccagaaacccccttttttagcttttgcttggggtgggggtaggagttaaggtttattcaatcctgtcctgggtagggcgaaagttaatctagccatgtgatttttcagaaaagtaagtggaacatgctgccacttttcaattctgtcagtgcttcc

SEQ ID NO: 712 - DNA, 538 bp, Homo sapiens
  misc_feature (1)..(538): 218103_at
aagtggcacagctgcgaagtctctacaagaaggctgggcttggcaaggagaaacgccatgtcacctacgttgtagccaaaaaaggtgtgggccgcaaagtgcgccggccagctggagtcagaggtcatttcaaggtggtggactcaaggatgaagaaggaccaaagagcacagcaacgtaaggaacaaaagaaaaaacacaaacggaagtaagcagagctgccaggctcccaggagagcatggggactaggaggaagggtgtggcatggctcagtctggcccccttgattaccggcctagcccctgctcacatcacagctgtctgaagaacagtgaggtggagtgcctagaactcccgtggtggtcctgagcagagaggaggatgtcctcctgcctgcctgaaggtctcccatgaaaacactgctgaactgtgttgacactcatgaccctttttttaaaccgttaaagggaagttcggtgttggagcgatactcaatgtagtcagtctacacctggacgtgtgggccacttaagccct

SEQ ID NO: 713 - DNA, 303 bp, Homo sapiens
  misc_feature (1)..(303): 218136_s_at
gggaaccaccaacacttgcaggtttagctttttcccagggttgactacaagaaagaaaaccatgtttttgcaagattaaaatgtggttgagtgtgcctaaattaaccatccccatttttatcatatttccaccatcacttcagggttttaagagtcagtgctcacctgggcggagctggtagtacattttgcttcttagaaagctaagtcctgggttccgtctgattttaggttccaggaacttcctgagaacacccgatcgcagagggtaattttctggagtttgttttgcagggatagctg

SEQ ID NO: 714 - DNA, 545 bp, Homo sapiens
  misc_feature (1)..(545): 218154_at
gcccctggacggtccagcaggtgctgtcctggagtgcctggtgttgtcctccggaatgctggtgccggaactcgctatccctgttgtctacctgctgggggcactgaccatgctgagtgaaacgcagcacaagctgctggcggaggcgctggagtcgcagaccctgttggggccgctcgagctggtgggcagcctcttggagcagagtgccccgtggcaggagcgcagcaccatgtccctgccccccgggctcctggggaacagctggggcgaaggagcaccggcctgggtcttgctggacgagtgtggcctagagctgggggaggacactccccacgtgtgctgggagccgcaggcccagggccgcatgtgtgcactctacgcctccctggcactgctatcaggactgagccaggagccccactagcctgtgcccgggcatggcctggcagctctccagcagggcagagtgtttgcccaccagctgctagccctaggaaggccaggagcccagtagccatgtggccagtctaccatggggccca

SEQ ID NO: 715 - DNA, 513 bp, Homo sapiens
  misc_feature (1)..(513): 218160_at
tgcggcccatcactatggagctcaatgtgataagcccaacaaggaatttatgctctgccgctgggaagagaaagatccgaggcggtgtttagaggaaggcaaactggtcaacaagtgtgctttggacttctttaggcagataaaacgtcactgtgcagagccttttacagaatattggacttgcattgattatactggccagcagttatttcgtcactgtcgcaaacagcaggcaaagtttgacgagtgtgtgctggacaaactgggctgggtgcggcctgacctgggagaactgtcaaaggtcaccaaagtgaaaacagatcgacctttaccggagaatccctatcactcaagaccaagaccggatcccagccctgagatcgagggagatctgcagcctgccacacatggcagccgcttttatttctggaccaagtaaagatgggtccgtggcccacactcggtcatgtgctcagacaacgactgatgaaaacgcccatgcggtttgcatcg

SEQ ID NO: 716 - DNA, 461 bp, Homo sapiens
  misc_feature (1)..(461): 218188_s_at
tccctggacaactccgagcagaagtgcatcgccatgtgcatggaccgctacatggacgcctggaacaccgtgtctcgcgcctacaactcgcggctgcagcgggaacgagccaacatgtgaccggcgagcgcgggccaccccaccctgttcatttccataaacgtgctttgagaggcggggtccgcatgtacgtactgcctgcccggggcttaggagggtggcaccggtgctgggacacacgggactgtgtcctcgccaccccccgccctgccccctgccagccagtgcagcttggatctcgggggtgtggggccctgtgccttcctgaagtgctggcagcccagtggcacctccttcaggcctttggggtattcccctagtgtgcccaagtcagcctcatattctgggcggacagcttgtctggacttcggagttgggggtggtcagacaccacaggagct

SEQ ID NO: 717 - DNA, 272 bp, Homo sapiens
  misc_feature (1)..(272): 218205_s_at
tccacgtgcgacctggaggactggtcagaaccgttactgtgaatgagtgaagatcctggaggaccctggccccaggccagctcccatcgctgggggacggtgaacggccatgtgttaatgttacgatgtttttaaaagacaaaaaaaaaaaaaaaacctcaaaagtttttttaaagtgggggaaaaacatccaagcactttaattccaatgtaccaggtgaactgacggagctcagaagttttcctttacaccaactgtcaatgccggaatt

SEQ ID NO: 718 - DNA, 384 bp, Homo sapiens
  misc_feature (1)..(384): 218249_at
ggaaaagtgtccctgtgatgctgaaacagatcaagccccagagggggagaagaaaaatagatagctgctgttaaaacaaaattatcctttaagtctgcttaattacttgaaaattgtacatattactaaagaattatgcaatgagcctactctggttaagatgttcttttcctcaaaggtgccctagtgccatgatttaaatatttttattaccattttgaaatggagaagccattctgcatatgcctttgaattcctgcccttctttaccacctcttcctccccctcaaaggaaaaacatttcatccaagtaagttaacggcattttctgtaggattttcttatgcactgcacactctggacctcacctgcagatacagttcc

SEQ ID NO: 719 - DNA, 477 bp, Homo sapiens
  misc_feature (1)..(477): 218270_at
gtggttcaagttatccggcagcgaaactgggtggtcgtgggagggctgaacacacattaccgctacattggcaagaccatggattaccggggaaccatggtccctagtgaagcccccttgctccaccgccatgtcaaacttgtggatcctatggacaggaaacccactgagatcgactggagatttactgaagcaggacagcgggtaagagtctccacacgatcagggagaattatccctaaacccgaatttcccagagctgatggcatcgtccctgaaacgtggattgatggccccaaagacacatcagtggaagatgctttagaaagaacctatgtgccctgtctaaagacactgcaggaggaggtgatggaggccatggggatcaaggagacccggaaatacaagaaggtctattggtattgagcctggggcagagcagctcctccccaacttctgtcccagccttgaaggctg

SEQ ID NO: 720 - DNA, 545 bp, Homo sapiens
  misc_feature (1)..(545): 218313_s_at
gctactgatctgtgatcaaccattttaactttcatctctagggatgtttaacatttataattgcaaaataaaccaactataaaaaaagaaactaagagagaattggtactttaattacttgtgtgtttgcaaataggctccattttccatgttgagtagattataaccttattaactaggcataggcctaagaaaggtggcaatgaactgtgcatgtaaattttaaatgggtactttgtgcaattcgttaaaagaagatactctatgaatatgattctatatattgaaatcagaaaacctaccaaacaaaaacatcagaagctgctgccataatgactattttctactgtaggctgctttggaaataattcccatatccttgctttgtaagttggtaatatcactatgcatttctacacattttataaatttgatttatgcagattttgatacactgtatgtttctgtagaaattgtataaatattcaaaattttattaggataaatttgagaaacttacgtatatcttaattctgggttgcttg

SEQ ID NO: 721 - DNA, 437 bp, Homo sapiens
  misc_feature (1)..(437): 218332_at
ccctccctttggatgctggtgaatactgtgtgcctagaggaaatcgtaggcggttccgcgttaggcagcccatcctgcagtatagatgggatatgatgcataggcttggagaaccacaggcaaggatgagagaagagaatatggaaaggattggggaggaggtgagacagctgatggaaaagctgagggaaaagcagttgagtcatagtctgcgggcagtcagcactgacccccctcaccatgaccatcatgatgagttttgccttatgccctgaatcctgatggtttccctaaagttattacggaaacagacccctgctttcgaatttacatgttcatgatgtgcccttgttgtaaacctttacctgtcacttgtttacgtgggtctcctattaccagcttctaattgaatattgtgtttttgaaccagtctgtaa

SEQ ID NO: 722 - DNA, 495 bp, Homo sapiens
  misc_feature (1)..(495): 218342_s_at
aaaggtggtctgtggatctgtctgaatagaaagagcacagtaagtatgcattgccggagaaaacgtccttgaagctgcttgtctcatgtgtatgatgtgctttttaaatcatgcccctcgttgcctgcctaatctgtgactccctaaaaactaactgggcccatgtagatggggctgcaaccagagctgaataacatgttaggctcacacatgcatcagcactgcacactgaaatcattgctcttcctggactttgtagaaatcagtctcaagtgcttcaagagtctggctcctgctacttttatctgtcaggtagcacataaggtttgcagggtttatattttgtatagaatcacagttgtggagaaaaagtaataatttctcaatgaattttaaaaatgggcctattttctatccccgtggttcatctgatataattagtgttccctgtgaattccccccctctatgggaaggatgcctttactctttatcag

SEQ ID NO: 723 - DNA, 545 bp, Homo sapiens
  misc_feature (1)..(545): 218345_at
gatttccgatatggctactcttattacaacagtgcctgccgcatctccagctcgagtgactggaacactccagcccccactcagagtccagaagaagtcagaaggctacacctatgtacctccttcatggacatgctgaaggccttgttcagaacccttcaggccatgctcttgggtgtttggattctgctgcttctggcatctctggcccctctgtggctgtactgctggagaatgttcccaaccaaagggaaaagagaccagaaggaaatgttggaagtgagtggaatctagccatgcctctcctgattattagtgcctggtgcttctgcaccgggcgtccctgcatctgactgctggaagaagaaccagactgaggaaaagaggcttttcaacagccccagttatcctggccccatgaccgtggccacagccctgctccagcagcacttgcccattccttacaccccttccccatcctgctccgcttcatgtcccctcctgagtagtcatgtgataataaactctcatgttattgttcccag

SEQ ID NO: 724 - DNA, 473 bp, Homo sapiens
  misc_feature (1)..(473): 218409_s_at
gacatgatcacccagcgagaggacgcagagggggtggcagcggaggaggagcaggagggagactccggtgagcaggagaccggggccactgatgcccggcctcggaggcggaagccagccaggctgctggaggctacagcgaagccggagccagaggagaagtccagagccaagcggcagaaggactttgacatagcagaacaaaacgagtccagcgacgaggagagcctgagaaaagagagagctcggtctgcagaggagccgtggactcaaaatcaacagaaacttctggaactggcgttgcagcagtacccaaggggatcctctgaccgctgggacaaaatagccagatgtgtcccgtccaagagcaaggaagactgtatcgctaggtacaagttgctggttgaactggtccaaaagaaaaaacaagctaaaagctgaatattctgggagatgatgttcaccttcatttt

SEQ ID NO: 725 - DNA, 410 bp, Homo sapiens
  misc_feature (1)..(410): 218463_s_at
gaacaagagacactgctgagcaccattaagtgtgggcgtctacagaggaatctggggcctgctctgagcaggaccttatcccagctctactgcagctacggccccttgacctgagcttatgccgtgaaacagcccccagcccccgtctgtcccccaacccaggctagccagccttttaacaacatcttttggggtacaattagaatctaagtgtttgcagccatatgtgtcatgtagaagatgcctagccctggggaccttgtgaaatacgcaggaaccagggataccatctggtccagtggtttttaaacaaagctgcttagcacctggaattccctggtcagggagatggagtcagtggggcattgcagcttggaatctattttatgtcaccagttggtcctcatcaa

SEQ ID NO: 726 - DNA, 557 bp, Homo sapiens
  misc_feature (1)..(557): 218486_at
  misc_feature (101)..(101): n is a, c, g, or t
gactgtacacactataaatggcatcaaatttggatatttttcttaattatgacatgcaaagtaatgtgagtcctgccagtattctggtggataaggtcttntgagtatttggttgcttgtcacaacattctccaagcagtgatatttctaaagaggagatacatgttgaaaacggttttaatttacacttccatttcctgattacatttggaaatactttgtgtaaaccatcccccttccacctccatttgtctgttgaaagattttaagttggaaacagttcctgtctgaaaactcttctgagaaccacaaaccttgtgtatggattcggcatggagccctcagctggcggctctgggtgctgacggccgctggagaggtgggctcccctcgtgcactttattgcctgggcagttttgcttgatcttttgtgactttgagccttttaagtagtttgaatgataagacttaaaatgtttcataattatgttttatgtaacagactttgacattatttaaacgagcatgtgtaatgtaacttttctctttgaatcata

SEQ ID NO: 727 - DNA, 473 bp, Homo sapiens
  misc_feature (1)..(473): 218559_s_at
tcaagtgcgttctttagaccaatgcattgcgtttctttccctgcttttgagatagtaggaagagttcttggtggtgtccccccccttcaattcttcagttgtatagtagttatagggaagatatgggtgtttttctttattattacttttttttttctgcaggtcagtaaaaggatttaagttgcactgacaaaaataccaaaataaaagtgtatttttaagttcccatttgaaattgctggcgctgctggccggatgcatttttgagtttgtattagttgataaattaacagtaataacaagattgtatgaaccgcatggtgcttgcagttttaaatattgtggatatttgtcctgcatcagaaacgagctttggtttttacagattcaactgtgttgaaatcaaacctgccgcaacagaaattgtttttatttcatgtaaaataagggatcaatttcaaaccctgcttatg

SEQ ID NO: 728 - DNA, 481 bp, Homo sapiens
  misc_feature (1)..(481): 218585_s_at
gacaactttttaattcctttgatcttataagttaaagctgtaacaactgaaattgcatggatcaagtaagcatagttttatccagggagaaaaataaaaggaagccatagaattgctctggtcaaaaccaagcacaccatagccttaactgaatatttaggaaatctgcctaatctgcttatatttggtgtttgttttttgactgttgggctttgggaagatgttatttatgaccaatatctgccagtaacgctgtttatctcacttgctttgaaagccaatgggggaaaaaaatccatgaaaaaaaaaagattgataaagtagatgattttgtttgtatccctacccatctcctggcagccctactgagtgaaattgggatacatttggctgtcagaaattataccgagtctactgggtataacatgtctcacttggaaagctagtacttttaaatgggtgccaaaggtcaactgtaatg

SEQ ID NO: 729 - DNA, 455 bp, Homo sapiens
  misc_feature (1)..(455): 218642_s_at
gttgccttctgcagctgtagtatcagtttttgaaccacagtaatgggaagaaagacaaatggattcccttagaagtaagatttctatttgcaggatgagttgggcagggaaaagggtcagggttcatcaggtgaactcaacactgggatgagactagaacttcactttatgatataaacacaatacgattattcaatgtggtgactggggtagactgtgaagcagccctccttatgcccactgccttttagaatcgtttgttttattcatggtagttttatgaagacatactattattgaatgaaatttaatgtgtacttgaaaacattgcttttgtcccttctcttcatctggtcttgggtcaagaacattgttttaatggctgccgacaatgaactgtctgtctgagtctaaaaccaagctcaggtttctaagccacatgaccttgattgtta

SEQ ID NO: 730 - DNA, 477 bp, Homo sapiens
  misc_feature (1)..(477): 218646_at
gaattggggtactcgcttgaacagagaaccgtgaagatgaaacagagagataagaaagttgtgacaaagacctttcatggtgcaggcttggttgttccagtagataaaaatgatgttgggtaccgagagctccctgaaacagatgctgacctcaagagaatttgcaagacaatagttgaggctgcaagtgatgaggagagactaaaagcttttgctcccattcaggaaatgatgacttttgtgcagtttgctaatgatgaatgtgattatggcatggggcttgaattgggaatggatctcttttgctatggctcacattattttcataaagttgctggccagcttttacctcttgcatataatctgttgaagaggaatctgtttgcagaaattattgaggagcatctggcaaacagaagtcaagagaacatagaccaacttgctgcatgagtaaggtggctttgattggtgtacagt

SEQ ID NO: 731 - DNA, 501 bp, Homo sapiens
  misc_feature (1)..(501): 218696_at
gaagaaggaaagtccccctgtgtggtaactgtattgttctagaaatatgctttctagagatatgatgattttgaaactgatttctagaaaaagctgactccatttttgtccctggcgggtaaattaggaatctgcactattttggaggacaagtagcacaaactgtataacggtttatgtccgtagttttatagtcctatttgtagcattcaatagctttattccttagatggttctagggtgggtttacagctttttgtacttttacctccaataaagggaaaatgaagctttttatgtaaattggttgaaaggtctagttttgggaggaaaaaagccgtagtaagaaatggatcatatatattacaactaacttcttcaactatggactttttaagcctaatgaaatcttaagtgtcttatatgtaatcctgtaggttggtacttcccccaaactgattataggtaacagtttaatcatctcacttgctaacatgtttt

SEQ ID NO: 732 - DNA, 404 bp, Homo sapiens
  misc_feature (1)..(404): 218708_at
ttccagcgagttccaaatcagcgtggtagactgccagcctgttcatgatgaagccacaccaagccagaccacggtccttgttgtcatctgtggatcagtgaagtttgaggggaacaaacaacgggacttcaaccagaacttcatcctgaccgcccaggcctcacccagcaacacagtgtggaagatcgcaagtgactgcttccgcttccaggactgggccagctagtgggggtggcagaggtctctttgcttcattcagccctagctctgtagagaaatgcaaacctcgactctcaaggatgtgaggaacacaagttcatttctgttgttgcggagacactgcagactccactgtgccgaggttgaactcttttttgttgctcaagttctaggagtccctttcc

SEQ ID NO: 733 - DNA, 429 bp, Homo sapiens
  misc_feature (1)..(429): 218711_s_at
ggcgacctccagggggagtaactcggggatggacagcaacatcgacttgactattgtggaagatgaagaggaggagtcagtggccctggaacaggcacagaaggtacgctatgagggtagctacgcgctaacatccgaggaggcggagcgctccgatggggaccccgtgcagcccgccgtgctccaggtgcaccagacctcctgagcttagagccaccgtgccatcctgtgctgtgctcaagcgggcagccagggctgaagaacaaactcttgcacatctccagcacgactcacccactcctgcgttcctgtccaggcagtaatcattgaccatatagtcatagtaagacacacgagaccaggctttaccatgaaagcgacctgtcacggactccacttttaatttgctcttaggttctatctctgtag

SEQ ID NO: 734 - DNA, 495 bp, Homo sapiens
  misc_feature (1)..(495): 218718_at
gtatttcattctcgtatggtgctagagttagattaatctgcattttaaaaaactgaattggaatagaattggtaagttgcaaagactttttgaaaataattaaattatcatatcttccattcctgttattggagatgaaaataaaaagcaacttatgaaagtagacattcagatccagccattactaacctattccttttttggggaaatctgagcctagctcagaaaaacataaagcaccttgaaaaagacttggcagcttcctgataaagcgtgctgtgctgtgcagtaggaacacatcctatttattgtgatgttgtggttttattatcttaaactctgttccatacacttgtataaatacatggatatttttatgtacagaagtatgtctcttaaccagttcacttattgtactctggcaatttaaaagaaaatcagtaaaatattttgcttgtaaaatgcttaatatcgtgcctaggttatgtggtgact

SEQ ID NO: 735 - DNA, 470 bp, Homo sapiens
  misc_feature (1)..(470): 218788_s_at
agcaattctgaacggcttcccgatatcaacatctaccagctgaaggtgctcgactgcgccatggatgcctgcatcaacctcggcctgttggaggaagccttgttctatggtactcggaccatggagccatacaggatttttttcccaggaagccatcccgtcagaggggttcaagtgatgaaagttggcaaactgcagctacatcaaggcatgtttccccaagcaatgaagaatctgagactggcttttgatattatgagagtgacacatggcagagaacacagcctgattgaagatttgattctacttttagaagaatgcgacgccaacatcagagcatcctaagggaacgcagtcagagggaaatacggcgtgtgtctttgttgaatgccttattgaggtcacacactctatgctttgttagctgtgtgaacctctcttattggaaattctgttccgtgtttgtgtag

SEQ ID NO: 736 - DNA, 372 bp, Homo sapiens
  misc_feature (1)..(372): 218793_s_at
tatttgccatcattagtacctctcaacttactttttagaggacaagaaacaatctgtagattggtttccatacagggaagttctccgtcctatgcaatgtttctaattaatttgcttaattctgagccattaatcctgctacactttgaatgatacattaattcagactaatctttgggggctttattttgtaagttagaactttcaagggaaacatgttcaacactattattttgttataaatttataactttgttattacattgtgtaacaaatataaggtttacgagctatgagaattggtgctatcaccattagctatttgctgtaatgtcaagaaaatgttcaccagatgcaagaatgtaccttttc

SEQ ID NO: 737 - DNA, 460 bp, Homo sapiens
  misc_feature (1)..(460): 218795_at
caagctgccccatgctgaagagatttgcacggatgatcgaacagagagctgtggacacatccttgtacatactgcccaaggaagacagggaaagtcttcagatggcagtaggcccattcctccacatcctagagagcaacctgctgaaagccatggactctgccactgcccccgacaagatcagaaagctgtatctctatgcggctcatgatgtgaccttcataccgctcttaatgaccctggggatttttgaccacaaatggccaccgtttgctgttgacctgaccatggaactttaccagcacctggaatctaaggagtggtttgtgcagctctattaccacgggaaggagcaggtgccgagaggttgccctgatgggctctgcccgctggacatgttcttgaatgccatgtcagtttataccttaagcccagaaaaataccatgcactctgctctca

SEQ ID NO: 738 - DNA, 395 bp, Homo sapiens
  misc_feature (1)..(395): 218825_at
atcgactccctgagcgagcagatttccttcctggaggagcagctggggtcctgctcctgcaagaaagactcgtgactgcccagcgccccaggctggactgagcccctcacgccgccctgcagcccccatgcccctgcccaacatgctgggggtccagaagccacctcggggtgactgagcggaaggccaggcagggccttcctcctcttcctcctccccttcctcaggaggctccccagaccctggcatgggatgggctgggatcttctctgtgaatccacccctggctacccccaccctggctaccccaacggcatcccaaggccaggtgggccctcagctgagggaaggtacgagctccctgctggagcctgggacccatggcacaggccagg

SEQ ID NO: 739 - DNA, 492 bp, Homo sapiens
  misc_feature (1)..(492): 218828_at
tttcctccatgtacactgcaggggacagaaggggggccccatccctaccctactccctggccgcctgcccctgtggttcccaaggaggggtatgtatgagagccgctctcctgctacctcccaccactgtcccagcagtccctcggcacacaggcatatcagctttcacactttccccatgcactctctcccacccccttccagggcctctgctccaaaggaggcctctggaacccaggactctggggttttacaagagggctggggtgtggaagggcaagctgcaccaaagacggtggatatagccaccgcccccccgccgctgcctagcatctgcttggccaattagttcagcctcagaccatggcactttgagggggtctctacctccccatcaacagctgcagggggaccccagtgccaacttcctctcccactagggccctgccttcagctggtgcttgctgcgattcctgtgccttatgtaactgc

SEQ ID NO: 740 - DNA, 497 bp, Homo sapiens
  misc_feature (1)..(497): 218831_s_at
cctcgtcgtcactaacagtcaaaagtggcgatgagcaccactactgctgcattgtgcagcacgcggggctggcgcagcccctcagggtggagctggaatctccagccaagtcctccgtgctcgtggtgggaatcgtcatcggtgtcttgctactcacggcagcggctgtaggaggagctctgttgtggagaaggatgaggagtgggctgccagccccttggatctcccttcgtggagacgacaccggggtcctcctgcccaccccaggggaggcccaggatgctgatttgaaggatgtaaatgtgattccagccaccgcctgaccatccgccattccgactgctaaaagcgaatgtagtcaggcccctttcatgctgtgagacctcctggaacactggcatctctgagcctccagaaggggttctgggcctagttgtcctccctctggagccccgtcctgtggtctgcctcagtttcccctcctaatacatatggct

SEQ ID NO: 741 - DNA, 539 bp, Homo sapiens
  misc_feature (1)..(539): 218847_at
aaagcgaaacacacaaaccagcctcaacttacacttggttactcaaaagaacaagagtcaatggtacttgtcctagcgttttggaagaggaaaacaggaacccaccaaaccaaccaatcaaccaaacaaagaaaaaattccacaatgaaagaatgtattttgtctttttgcattttggtgtataagccatcaatattcagcaaaatgattcctttctttaaaaaaaaaaaatgtggaggaaagtagaaatttaccaaggttgttggcccagggcgttaaattcacagatttttttaacgagaaaaacacacagaagaagctacctcaggtgtttttacctcagcaccttgatcttgtgtttcccttagagattttgtaaagctgatagttggagcatttttttatttttttaataaaaatgagttggaaaaaaaataagatatcaactgccagcctggagaaggtgacagtccaagtgtgcaacagctgttctgaattgtcttccgctagccaagaacctatatggccttcttttggac

SEQ ID NO: 742 - DNA, 492 bp, Homo sapiens
  misc_feature (1)..(492): 218856_at
tgtatggttttcacctggacaccgtgtagaatgcttgattacttgtactcttcttatgctaatatgctctgggctggagaaatgaaatcctcaagccatcaggatttgctatttaagtggcttgacaactgggccaccaaagaacttgaacttcaccttttaggatttgagctgttctggaacacattgctgcactttggaaagtcaaaatcaagtgccagtggcgccctttccatagagaatttgcccagctttgctttaaaagatgtcttgttttttatatacacataatcaataggtccaatctgctctcaaggccttggtcctggtgggattccttcaccaattactttaattaaaaatggctgcaactgtaagaacccttgtctgatatatttgcaactatgctcccatttacaaatgtaccttctaatgctcagttgccaggttccaatgcaaaggtggcgtggactccctttgtgtgggtggggt

SEQ ID NO: 743 - DNA, 505 bp, Homo sapiens
  misc_feature (1)..(505): 218858_at
gaactgccttactagatttctatttgtagctctcattcattgttttttatcttagtttgcagaaaggtgttgaaatgcttctctagcccaaacagcgacatgctaaagtccccttcttcagagtcaatagagtagttgttaaaggttttaaattgtactttctccaaaattagcatgcagctatttaatagggaatctagatttcaccaagattcaaatcaaagcaacatttaaaggaataagacctgttcactagcattttcaagggggttctaaagcattcaagtgcttaaaagccataaaaaatgacttcttaattcctgcctttagtgtcaacttttaagttaatacaggtttcaattgtggcattaggaaaaaaaaaaaaaccttgtgatgctatggttgggggtagttagggagagactacatgaaattgtgtgcccctattttctttctgatcctaaatcattttgttttataaatcagctatagcatctttctagaa

SEQ ID NO: 744 - DNA, 350 bp, Homo sapiens
  misc_feature (1)..(350): 218880_at
  misc_feature (57)..(57): n is a, c, g, or t
  misc_feature (291)..(291): n is a, c, g, or t
gacccaggtgggacttagcagtgagtattggaagacttgggttgatctcttagaagnccatgggacctcctccctcattcatcttgcaagcaaatcccatttcttgaaaagccttggagaactcggtttggtagacttggacatctctctggcttctgaagagcctgaagctggcctggaccattcctgtccctttgttaccatactgtctctggagtgatggtgtccttccctgccccaccacgcatgctcagtgccttttggtttcaccttccctcgacttgacccttncctcccccagcgtcagtttcactccctcttggtttttatcaaatttgccatgacatttc

SEQ ID NO: 745 - DNA, 389 bp, Homo sapiens
  misc_feature (1)..(389): 218883_s_at
aaacgtatgattcatccagccttccagctctgttatttaaagcaagaacacttctgggagccgaaagccatctgcgaaatatcaaccatcagttagagaagctccttgaccagggatgagaagagcagtctactaaaatgtgcctataggaagactagtctcatgctgttaccttctgaaactgtacctttataaatcaattgttttgcaaagaagttatggcctacttagaatctaaaatttgttattcaaattaaatggctgtgaacaatgttaaatagcatcagtttgtccaatagttttaaaggccataatcatcttttctggttaatatcttgagtaattttaaaatgttgacaccttaatcggtcccaggtatgagctataat

SEQ ID NO: 746 - DNA, 530 bp, Homo sapiens
  misc_feature (1)..(530): 218899_s_at
acaagactttaccatacacgcaactatagtttttctaaaccttcatcattttgtgattctttgagaaagggcttttaggaactttatgttctaaaaaatgtttttaacaataataagataaaagaaaaacctgtgattcatatgtccccactggcattactcagcaggagcccccagctgccaaaggttggcagtgatcctgcaagttcaagggctctttctccctggggatgtgctttgtggcttctctttacagctttgtttctgcatcagttcactgctgcatgttgtttggaatttatcaccttaagaaagtgtctctgttttatatagaaacactttctcacttacaggggagaaggaaatgcagggcacatgatctggccctccccagaacaatctggatttcacggagacagcaaccagaagttaaaccatgtgactaaaaatgcatctggctactttttcatgtatgtatgagacagaaactaatccttactatcctattaggataccacttttcattgcaa

SEQ ID NO: 747 - DNA, 446 bp, Homo sapiens
  misc_feature (1)..(446): 218927_s_at
gacccgcacacggagaagctggcgcccttcaacgagcactggcggcaggtgtaccgcctctgccacccgtgccagatcgactacgacttcgtggggaagctggagactctggacgaggacgccgcgcagctgctgcagctactccaggtggaccggcagctccgcttccccccgagctaccggaacaggaccgccagcagctgggaggaggactggttcgccaagatccccctggcctggaggcagcagctgtataaactctacgaggccgactttgttctcttcggctaccccaagcccgaaaacctcctccgagactgaaagctttcgcgttgctttttctcgcgtgcctggaacctgacgcacgcgcactccagtttttttatgacctacgattttgcaatctgggcttcttgttcactccactgcctctatccattgagtac

SEQ ID NO: 748 - DNA, 491 bp, Homo sapiens
  misc_feature (1)..(491): 218964_at
acgtggtgccagtgaggagcccagttggctggcactgggcccatttgaaggtgtctcagacatttggccagtatgtctttctcaggggtttggtcacaaaggatggactcttcccacccagaggatgcagggaaagcacactgtgtctttccggtcattggatcctctccctttccccaggcagctcgcctggccacaccgttggagtgaaccctcactgccctcaaggacaacagcagggtgtcacccagagcccgatgaggggtgccagcaggtgcccccacgagtggggccttggcccaagcagagcttcccctgaaggtgccatcagccagggcagctctgtcccctcctgctctccatcttatatgtattctaaccaggaaaaatgtgatagcacatgggtagcctaggcagtgagtaaatacctcagatgtcctcctgcagcaagtgtctatatgttgtggttattttctatcttacatgttctc

SEQ ID NO: 749 - DNA, 467 bp, Homo sapiens
  misc_feature (1)..(467): 218966_at
tcttacctgccaacatattcaccataatttttttattttttaatacctttcatacaataacttttttaaaacaacctcagattgaaaaagcaacctaaattactttcgctctctaatcagcatttcaatgtatttatttttaaattttctcaaaaagtaactaaaaaattgtgtcggaccctacttttgagaaatttacgtttcccaagttttatgggaactggctattccttgtcccggcacaccttctcattccttcctttcagagcctaaaacctcatttgataagcactcctagtctctggcctgtggatccagtgctattctgtcaccaacctaagaatcccaattgcaccttctgtttctgacagtcacaggtgacagctgtgattctataatacagactggtgtcttagaggtaggaataatacatgattatgaagcatcaccctgctaatacataataa

SEQ ID NO: 750 - DNA, 525 bp, Homo sapiens
  misc_feature (1)..(525): 219007_at
aatgtattattgacctgagaccttaatgacaaatcactgctattagacaattgaagtgttcatttactttgtaattccaataatcatagttatggaattatggtaaggttttgcttttctgtcctaataaatatatatattttttgagatggagttttgctcttgttgctgaggcaggagagttgctcgagcccgggaggcagaggttgcagtgacccaggatcgtgccacttcactccagcctgggcaaaagagcaaaacgccatctcaaaaaatatacatatataaggagataaagtttcccattttccaatacagtttcacatttgaacagccctaattgatacaactttatggcagggttttagtgtgtgagtgggatccaaaacactcaatcctgtaaaagggtacagtcctattgtatgttagttaacacactgatgatgtgagcctgtgagatgagccaatcaccagttgttatgttcgaatctgctttgtgttgggacgctttaatgtagggtttca

SEQ ID NO: 751 - DNA, 305 bp, Homo sapiens
  misc_feature (1)..(305): 219033_at
aaggacagcaatcccaattcctgcaaagccgtaacttaaaatgcatagccttatgtgaagtgatcacctcatctgacctgcacaaacatggagagatatgggttgtccccaatactgaccatgtctgcacacgattctttttcgtctatgaagacggccaagtgggagatgcaaatattaatacacaagaaggaggcattcacaaagagatcctccgagtaattggtgatcaaactgctactggttaaaggaccaccatttaattaacatgattcgaaagccttcctcgggttcaaagctggatt

SEQ ID NO: 752 - DNA, 480 bp, Homo sapiens
  misc_feature (1)..(480): 219040_at
tcaagctggaagatacctctctggccccggcacatgtcacccctgcactcctgccttcccgtgggcacttccacatcctctgggcctctggcagttcccagggactgttttcacctctgctgtctctggggtcagctgctgctcatcagctgcccgctagcatgtggccaggggtgcagggtggcggggggtcagcagcatgtccctgggcaggccctgggcaccctgtctcccctggtctcactgctgacctgggctggtcccagcctggattggcctcatccaggatctttggtcaccccacgctgccccatcttgcctgctgttccagttctggtcaagggccttgggggctggccccccaccaggccttctagagcagcaccagtctcagggccctgggaccagctgccctacttcccaggtttgtagccaggagaagggggcatcacagagctgatggtccaataaggggggtgt

SEQ ID NO: 753 - DNA, 518 bp, Homo sapiens
  misc_feature (1)..(518): 219054_at
gacaacaatgaagtagcccctgaacagcatggagttgctgtgagtttgttcgttgcagacctttgtgttgggtcctgggaatctgagctttgttccctgtgcatggtggataattgaaaccaagaggacatgggatagaccttgtgacagaccaattctgtgacccctgtcttctgggtcacattattcattgttgatttaaatacaggactaccaaacagtacaaatctatcatgagtctggtagaaaagtaaaagtaaaagctgcacacgttacatactgtttattgttctaatgtacaactaactatttgcatataatgtgatttaatttattgctgttttgtgtagaaaaggagaactaatgactgtggatataacccatgttttgtataatatattttatttcttgtgcgaactggtcatttaaaatatctacttcatttgatgtttggatataaatgtgtatgtgtccttgtaaatgtttctatcaagcaagaatgccacgtactcagagta

SEQ ID NO: 754 - DNA, 168 bp, Homo sapiens
  misc_feature (1)..(168): 219117_s_at
tgcagtggtgcagtatgacgtggagctgattgcactaatccgagccaactactggctaaagctggtgaagggcattttgcctctggtagggatggccatggtgccagccctcctgggcctcattgggtatcacctatacagaaaggccaatagacccaaagtctccaa

SEQ ID NO: 755 - DNA, 285 bp, Homo sapiens
  misc_feature (1)..(285): 219118_at
gctgggctcgaaaccgaaagtcccgtccggaccctccaagtggagaccctggtggagcccccagaaccatgtgccgagcccgctgcttttggagacacgcttcacatacactacacgggaagcttggtagatggacgtattattgacacctccctgaccagagaccctctggttatagaacttggccaaaagcaggtgattccaggtctggagcagagtcttctcgacatgtgtgtgggagagaagcgaagggcaatcattccttctcacttggcctatggaaaa

SEQ ID NO: 756 - DNA, 442 bp, Homo sapiens
  misc_feature (1)..(442): 219155_at
ctgtgaagtctgaggtctgggggcttcagaccagagtggaacaatttgtacacaaggtggtccgagacattctgctgattggacatagacaggcttttgcatgggttgatgagtggtatgacatgacaatggatgaagtccgagaatttgaacgagccactcaggaagccaccaacaagaaaatcggcattttcccacctgcaatttctatctccagcatccccctgctgccttcttccgtccgcagtgcgccttctagtgctccatccacccctctctccacagacgcacccgaatttctgtccgttcccaaagatcggccccggaaaaagtctgccccagaaactctcacacttccagaccctgagaaaaaagccaccctgaatttacccggcatgcactcttcagataagccatgtcggcccaaatctgagtaacttta

SEQ ID NO: 757 - DNA, 398 bp, Homo sapiens
  misc_feature (1)..(398): 219218_at
aaggctgggggcttatgttgtggtcgggggtccccgcctccagccccccgctcccacccccgagcctaccctttgtctcgcatgagtgcaatatttcattcccggtggttgtctggggaggtggttggacgaggtcctgcttgaggctcggggatcagaacgatgtcaagtgaagaaaaatgcacgggggcatgctgagccactggagttccagagagggccgaggagggtgcagccacggaggttggatcctctgctccgccgcctcgtcctcgtcccgcttctgctgggttccgctttgtccctggttttttcctttttttttctgtgtgcgtgcgaatggtgcggcccctcccctctcaccgtggttaacgtgacgaaggcacgattcctgtaaa

SEQ ID NO: 758 - DNA, 208 bp, Homo sapiens
  misc_feature (1)..(208): 219279_at
atatttttgtttacctcgctagcttcagaattttgccaacctctgaatttgcacattttgtataattttttttttctttgagcagtgttgatcaagccaagttgaatatttgccatgaaattccagtgaatgtgtagctcaaatgcaaaccataagtttgctgtcagttattgtatggtcagtaccccagtcctagtacacatatttt

SEQ ID NO: 759 - DNA, 362 bp, Homo sapiens
  misc_feature (1)..(362): 219359_at
gggacttagtctcaatcccaggctcctcttgactctgggcagctttaatcaggttgggcagcctctgctacagcgtggagtgggatggctctcttccctcagccacgccgcttgtgaggacagaggtgggggagtgggaagtgggaagtcaccagagaacaggagagggatttgagggcgagaccccagcgctctccacggaccagccagagggactggagccaggtgtgcatgggtccaaggccctggccctgcccagcctctgtcttgggagctcagccccagggttcggtcgtcagcagtttcccaagaacaagatgtgatggcatctgctgctgaaaccctgatgaggaccaggcccc

SEQ ID NO: 760 - DNA, 495 bp, Homo sapiens
  misc_feature (1)..(495): 219423_x_at
gcagctctacgacgtgatggacgcggtcccagcgcggcgctggaaggagttcgtgcgcacgctggggctgcgcgaggcagagatcgaagccgtggaggtggagatcggccgcttccgagaccagcagtacgagatgctcaagcgctggcgccagcagcagcccgcgggcctcggagccgtttacgcggccctggagcgcatggggctggacggctgcgtggaagacttgcgcagccgcctgcagcgcggcccgtgacacggcgcccacttgccacctaggcgctctggtggcccttgcagaagccctaagtacggttacttatgcgtgtagacattttatgtcacttattaagccgctggcacggccctgcgtagcagcaccagccggccccacccctgctcgcccctatcgctccagccaaggcgaagaagcacgaacgaatgtcgagagggggtgaagacatttctcaacttctcggccggagtttggctgag

SEQ ID NO: 761 - DNA, 521 bp, Homo sapiens
  misc_feature (1)..(521): 219479_at
ggtgacagtgttgtgctgaagcaggattccatctactatgaacatttttacaatgagctgcagccctggaaacactacattccagttaagagcaacctgagcgatctgctagaaaaacttaaatgggcgaaagatcacgatgaagaggccaaaaagatagcaaaagcaggacaagaatttgcaagaaataatctcatgggcgatgacatattctgttattatttcaaacttttccaggaatatgccaatttacaagtgagtgagccccaaatccgagagggcatgaaaagggtagaaccacagactgaggacgacctcttcccttgtacttgccataggaaaaagaccaaagatgaactctgatatgcaaaataacttctattagaataatggtgctctgaagactcttcttaactaaaaagaagaatttttttaagtattaattccatggacaatataaaatctgtgtgattgtttgcagtatgaagacacatttctacttatgcagtattctcatgact

SEQ ID NO: 762 - DNA, 532 bp, Homo sapiens
  misc_feature (1)..(532): 219528_s_at
gccacttggcattagagggtctttcatggggagagaaggagactgaattactctaagcaaaatgtgaaaagtaaggaaatcagcctttcatcccggtcctaagtaaccgtcagccgaaggtctcgtggaacacaggcaaacccgtgattttggtgctccttgtaactcagccctgcaaagcaaagtcccattgatttaagttgtttgcatttgtactggcaaggcaaaatatttttattaccttttctattacttattgtatgagcttttgttgtttacttggaggttttgtcttttactacaagtttggaactatttattattgcttggtatttgtgctctgtttaagaaacaggcacttttttttattatggataaaatgttgagatgacaggaggtcatttcaatatggcttagtaaaatatttattgttcctttattctctgtacaagattttgggcctctttttttccttaatgtcacaatgttgagttcagcatgtgtctgccatttcatttgtacgcttgttcaa

SEQ ID NO: 763 - DNA, 519 bp, Homo sapiens
  misc_feature (1)..(519): 219559_at
tgtcctgcacactgtaggatgcttaaaggtatccctggcctccacccatccctagccagcagctcccagtcagacatgacctcagagtctctgtgtctcctagaagcctgacagagacccccagggcagtgggtgggtggcgggctagagacccttgcctgtgtccgggaccctggcgccgctctcccctcctgtggatccctccgcactaacagtgttctcagtgggcagacgcctgggcaccccttgggccctgcccagcatggccatggcgcaggctctcgaacccgcatggctttcccaggcctggtgattctgctctccagggacggttggcaccttcctcgggggcgggccccacgcaccccagaacacacagacccacctttctggcgttctttctacctcccttttcgttgcctgaggagctggtggtttcatgagttaatgatacatcttgcaaggtgtacacatagagaaaaaaacctaaaaatgtggaaaagcacgccaaagccttat

SEQ ID NO: 764 - DNA, 403 bp, Homo sapiens
  misc_feature (1)..(403): 219622_at
gaatgacacccgcagcagaatgttggagtggaaatgatggctggctatgaagaggaggtcaacgtgtgtggtctcctcagtctctgtcagaggggtggggaggtgggaaacaggaatcctctgcaaagcccaatctgcagagtcgagacccctggtgctctctgccccgctgcctggcactggtcctttgcagccagccaccaacggcccccttgcccttgcagaggcagaagcctgcgtctgcacctgcacctctgaccgtttcagcaccctgggttgttaccacgtcctacaactctgacatttcttgttctcaagcgtttctcttcactgtgagttgtctttggtcctcccacttggtacttgtatcttgatgctttataatcctgactctcgacgtgtt

SEQ ID NO: 765 - DNA, 344 bp, Homo sapiens
  misc_feature (1)..(344): 219649_at
tttagtatgctacctcttctattgaaggatgaactcctaatgccctctgttgtgacaacaatggcattttttatagcttgtgtaacttccttttcaatatttgaaaagacttctgaagaagaactgcagttgaaatccttttccatttctgtgaggaaatatcttccatgttttacatttctttccagaattatacaatatttgtttcttatctcagtcatcactatggtgcttctgacgttgatgactgtcacactggatcctcctcagaaactaccggacttgttttctgtattggtgtgttttgtatcttgcttgaacttcctgttcttcttggtatactt

SEQ ID NO: 766 - DNA, 411 bp, Homo sapiens
  misc_feature (1)..(411): 219654_at
gtacctacttctgtgattgtgactggggtccaagtgagctcaagaatctttatggtgtggctcattactcacagtataaaaccaatccagaatgaagagagtgtggtgctttttctggtcgcgtggactgtgacagagatcactcgctattccttctacacattcagccttcttgaccacttgccatacttcattaaatgggccagatataatttttttatcatcttatatcctgttggagttgctggtgaacttcttacaatatacgctgccttgccgtatgtgaagaaaacaggaatgttttcaataagacttcctaacaaatacaatgtctcttttgactactattattttcttcttataaccatggcatcatatatacctttgtttccacaactctattttcatatg

SEQ ID NO: 767 - DNA, 439 bp, Homo sapiens
  misc_feature (1)..(439): 219672_at
ggggacagagagattcacgcaccctcaagagtgtgggtgagacatatacagcctgttagacctgaaggcagatggctcttcttaaggccaataaggatctcatttccgcaggattgaaggagttcagcgttctgctgaatcagcaggtcttcaatgatcctctcgtctctgaagaagacatggtgactgtggtggaggactggatgaacttctacatcaactattacaggcagcaggtgacaggggagccccaagagcgagacaaggctctgcaggagcttcggcaagagctgaacactcttgccaaccctttcctggccaagtacagggacttcctgaagtctcatgagctcccgagtcacccaccgccctcctcctagctcagggacccagcccctcctctctgagaaactctgaccttcatgtccttaggctgtgc

SEQ ID NO: 768 - DNA, 457 bp, Homo sapiens
  misc_feature (1)..(457): 219789_at
ttatgattaatcaccatctgcctccaggcctttcatctcatgacaaacaaatataataatgatatcgtgtcactctgttaaatgttcatactgtttcaagcccatatgattagatttatgtttttaaaatctgttgtctccatatcttgatggcttttgggagcatttcacacaaggatataaaatgcggttttcttaaatgaaatgttttgtagctagaataaaatcatttttacaagtacagcattcttggaaagaatttaacacccaaaaaggggaaaatgtaatgaaaaatctcaaggttggaaatacagccttactctctctagagctggaggacaggtttgtggttgaggacttctctgtccgatgtctacattcaggttctgacttcatatcttgaaaaaggatttcctccctgtctttttcagtgtctcataaacgctactctggattg

SEQ ID NO: 769 - DNA, 533 bp, Homo sapiens
  misc_feature (1)..(533): 219837_s_at
gccagatcgtcagcgctaagggaactgagaccagagaaagaacccaagagaactaaagttatgtcagctacccagacttaatgggccagagccatgaccctcacaggtcttgtgttagttgtatctgaaactgttatgtatctctctaccttctggaaaacagggctggtattcctacccaggaacctcctttgagcatagagttagcaaccatgcttctcattcccttgactcatgtcttgccaggatggttagatacacagcatgttgatttggtcactaaaaagaagaaaaggactaacaagcttcacttttatgaacaactattttgagaacatgcacaatagtatgtttttattactggtttaatggagtaatggtacttttattctttcttgatagaaacctgcttacatttaaccaagcttctattatgcctttttctaacacagactttcttcactgtctttcatttaaaaagaaattaatgctcttaagatatatattttacgtagtgctgacaggacccactc

SEQ ID NO: 770 - DNA, 530 bp, Homo sapiens
  misc_feature (1)..(530): 219940_s_at
actgaaaacacaccagctgtctctggatgcttttctggttgccttgaagttcatgcaggtggaggacgtggacattgacgaagttcagtgtattctggctaacttgatatacatgggacacgtcaaaggctacatatcgcatcagcatcagaagctggtggtcagcaagcagaacccatttcctcccctgtccacggtgtgttgaaagtacacggagccccgaggacggactcggctggttctggagtctttgtgagacttctttgaaggaggctttgcgtgaaggctgctcggctcacttttcctaagtgtggttcctgaaggctgtctttgtaactttttgtagttctttgtgtaaaaagcgtattctgaatttatacacatggtatgttcttcattatatcttccaggatacatctatttttatatattaaatttgaatgtgttatcaaaatgcttggttaacttaaggcacctttttaaaagcagaatttaatttgatttaaattttccagattttatagcttgcc

SEQ ID NO: 771 - DNA, 288 bp, Homo sapiens
  misc_feature (1)..(288): 219947_at
gatccacttatgaactgaacattctccatgaacaggtggttggattggtatctgtcattgtagggatagataataagctcttcttattcatgtgtaagggaggtccatagaatttaggtggtctgtcaactattctacttatgagagaattggtctatacattgactgattcactttttcataaagtgagcatttattgagcattttttcatgtgccagagcctgtactggaggcccccattgtgcacacagggagagaacatgagtctctcttaatttttatctggt

SEQ ID NO: 772 - DNA, 491 bp, Homo sapiens
  misc_feature (1)..(491): 219974_x_at
gagtggggcccttaaactggattcaaaaaatgctctaaacataggaatggttgaagaggtcttgcagtcttcagatgaaactaaatctctagaagaggcacaagaatggctaaagcaattcatccaagggccaccggaagtaattagagctttgaaaaaatctgtttgttcaggcagagagctatatttggaggaagcattacagaacgaaagagatcttttaggaacagtttggggtgggcctgcaaatttagaggctattgctaagaaaggaaaatttaataaataattggtttttcgtgtggatgtactccaagtaaagctccagtgactaatatgtataaatgttaaatgatattaaatatgaacatcagttaaaaaaaaaattctttaaggctactattaatatgcagacttacttttaatcatttgaaatctgaactcatttacctcatttcttgccaattactcccttgggtatttactgcgta

SEQ ID NO: 773 - DNA, 547 bp, Homo sapiens
  misc_feature (1)..(547): 220051_at
tccaggcctccacatttgagtttgagaaccggacagactgctgggtgactggctgggggtacatcaaagaggatgaggcactgccatctccccacaccctccaggaagttcaggtcgccatcataaacaactctatgtgcaaccacctcttcctcaagtacagtttccgcaaggacatctttggagacatggtttgtgctggcaatgcccaaggcgggaaggatgcctgcttcggtgactcaggtggacccttggcctgtaacaagaatggactgtggtatcagattggagtcgtgagctggggagtgggctgtggtcggcccaatcggcccggtgtctacaccaatatcagccaccactttgagtggatccagaagctgatggcccagagtggcatgtcccagccagacccctcctggccgctactctttttccctcttctctgggctctcccactcctggggccggtctgagcctacctgagcccatgcagcctggggccactgccaagtcaggccctggttctcttctgtcttgtttggtaata

SEQ ID NO: 774 - DNA, 554 bp, Homo sapiens
  misc_feature (1)..(554): 220066_at
aaggggacacgtgacagccgtttgttccccaagacattctaggtttgcaagaaaaatatgaccacactccagctgggatcacatgtggacttttatttccagtgaaatcagttactcttcagttaagcctttggaaacagctcgactttaaaaagctccaaatgcagctttaaaaaattaatctgggccagaatttcaaacggcctcactaggcttctggttgatgcctgtgaactgaactctgacaacagacttctgaaatagacccacaagaggcagttccatttcatttgtgccagaatgctttaggatgtacagttatggattgaaagtttacaggaaaaaaaattaggccgttccttcaaagcaaatgtcttcctggattattcaaaatgatgtatgttgaagcctttgtaaattgtcagatgctgtgcaaatgttattattttaaacattatgatgtgtgaaaactggttaatatttataggtcactttgttttactgtcttaagtttatactcttatagacaacatggccgtgaactttatgctgta

SEQ ID NO: 775 - DNA, 340 bp, Homo sapiens
  misc_feature (1)..(340): 220088_at
attatgctttctattttgagatcattgcaaactcaacacaattgtaagtaatgatacagagggatcttgtgtacccttcacccagcctcccccaatggcaacatcttgcaaaactacaatgtagtctcataaccaggatattgacattgatacagtgaagatacaggacattctcatcaccacagggatccccaggatgcccacttccctccacccccacaccccagccgtgtccctaacccctggcaaccaggaatccactctccatttctataatgttgtcatttcaagaatgttattcaatggaatcatatagtatgtaacctgttttgagcttaaa

SEQ ID NO: 776 - DNA, 567 bp, Homo sapiens
  misc_feature (1)..(567): 220232_at
acctgtacacgttgattatttttgtaagtcaaaagtgattaagaggagtttaagctatcatttccagatgtatttctataaataaaaacataagtatattcagttgatttggggtggagagttccatagatgtctgttaggtccgcttggtccagagctgagttcaagtcctgaatatccttgttaattttctgtcttgttgatctgtctaatattgacagtggggtattaaagtctcccactattattatatgggagtctaagtctccttgtaggtctctaagaacttgctttatgaatctgggtgctcctgtattaggtgcatacatatttaggatagttagctcttcttgctgcattgatcccattaccattatataatgcccttctttgtcttttttgatctttgttggtttaaagtctgttttattagagactaggattgcaacccctgctatttttttttttttttttgcttgataaatattcctgtatccctttattttgagcctatatgtgtctttgcacgtgaggtgggtctcctgaatacagcacaccgatgggttt

SEQ ID NO: 777 - DNA, 424 bp, Homo sapiens
  misc_feature (1)..(424): 220240_s_at
catctcttgcggatcaaacccacgcagagcgtcttcatttccacgtgtctgtccttgtcaagcacacccctcgtgtccaggttcctcatgggcagtgctcggggtgacaaagaaggcgacattgactacagcaccgtgctcctcggcatgctggtgacgcaggacgtgcagctcgggctcttcatggccgtcatgccgactctcatacaggcgggcgccagtacatcttctagcattgtcgtggaagttctccgaatcctggttttgattggtcagattcttttttcactagcggcggtttttcttttatgtcttgttataaagaagtatctcattggaccctattatcggaagctgcacatggaaagcaaggggaacaaagaaatcctgatcttgggaatatctgcctttatcttcttaatgt

SEQ ID NO: 778 - DNA, 413 bp, Homo sapiens
  misc_feature (1)..(413): 220377_at
cctccagctgtgtctagtgctgcagggatctcggcatgaggccccttctcccaggaggggaggcacagcctggagacacaggccccatccttcccaatggggacacttcaggagcggctctcaggtcccgagaaagaccttcctggccacaggagacacacggacatcgggaacggacggaggaaggatgtgcagttgcagccttttcagcagacgccctgagaacgggaggtcaagagttggagcagacgggcctcagacctaaggcaggagcacccctatgccagacctcctgggtcacaggatatgccacggacattgggaagggatggaggatggacggaggaaggacgtgcagttgcagctctttctgcagatgccctgagagaggagcaagaaggtcctcgccagat

SEQ ID NO: 779 - DNA, 405 bp, Homo sapiens
  misc_feature (1)..(405): 220408_x_at
cttaaatctactccagcttccaggtggttcacttatttttaacactctgcagcagcagcaacagcagctctcccagtttacaccacaacaacctcagcagcccacaacttgtagtcctcaacagccaggggagcagggttctgagcaaggttcaaccagtcaagaacaggccttatctgctcagcaagctgctgttattaaccttactggagtaggaagttttatgcagtcacaggcagctgcagttgcgattcttgcagcatcaaatggctatggcagcagcagcagcacaaacagctcagctacatcatcatcggcatacaggcagccagtcaaaaagtaaaatgaagagaggcacgccaaccactccaaaattttgagtcttgcattactttttgttccttt

SEQ ID NO: 780 - DNA, 498 bp, Homo sapiens
  misc_feature (1)..(498): 220416_at
ttcaaaaagctctcagtctgtgtcatgtaaggacatgcttatgaaatgtgagagaggctcgccactaagtattctaaatacttttcaatggcttttctaacaacctcagtagtaatttgctgagcatcatccagaccattaatagaatcagcaaagcactggaatttcacactttaatgataatattccacatagtctatgggcaaatattttcaacatttccaatttttaaagcttcagaattgaagccaaacaaattaataaataattgttttaattactatttaaaaactcaggtttagattgtttaaaattagttgcttttgatactcagctgtcatgtttataattcaaacatgtagtaaacatatgtaggtaaggttgtttttttggagatgttgcagctcaaatttcagtccacatatgaatcatcagtgtattttccataaagtgattcgggcatatttgtgtgaaaacctcagttctgtcacttcttac

SEQ ID NO: 781 - DNA, 533 bp, Homo sapiens
  misc_feature (1)..(533): 220532_s_at
atctggcaaactgaaccctttttatacatcgacactgtgtgtgatcgctcagaccctgtcttccctaccactgggtacagatggatgcggcgaagtcaagagaaccaatggcagaaggaggagtgtagagcttacatgcagatgctgaggaagttgttcacagcaatccgtgccctgttcctggctgtctgtgtcttgaaggtcattgtgtccttggtttccttgggagtaggtcttcgaaacttgtgtggccagagctcccagcccctgaatgaggaaggatcagagaagaggctactgggggagaattcagtgcccccttcgccctctagggagcagacctccactgccattgtcctgtgagccgccaaagaccccacggggtgcccgcatgtccctgtctagggcagcccagggcccccactcctggctcctcacacttgcctcccctatggccgctctccagaccctcctcctttcttctccccacatccgcacctgctgttcccactctggggttctcaagtccatga

SEQ ID NO: 782 - DNA, 493 bp, Homo sapiens
  misc_feature (1)..(493): 220615_s_at
gtattcaactttgacgtgcgccagttgaactggttggaatacattgaaaattatgttttgggagttaaaaaatacttattgaaagaggatatggctgggatcccaaaggcaaagcaacgcttaaaaaggctccgaaatattcactacctctttaatactgccctcttccttatcgcctggcgccttctcattgcaagatctcagatggctcggaatgtctggttcttcattgtaagcttctgttataaattcctctcctactttagagcatccagcacgctcaaagtttaagagcatttagccatcgccttttatctggaacctctcagatacctctaaaacagcaaactgtgattctcaagattagaaagtaacaaggaatatgcccaaactgtcaaatgtcacctgttatgtattcgtccctattccttaactatgtatttttatttcagtgagagaaggaaagttgtaaactagcccatagtcacctata

SEQ ID NO: 783 - DNA, 549 bp, Homo sapiens
  misc_feature (1)..(549): 220646_s_at
atattcttcataaagggaccagctaaagaaaacagctgtgctgccattaaggaaagcaaaattttctctgaaacctgcagcagtgttttcaaatggatttgtcagtattagagtttgacaaaattcacagtgaaataatcaatgatcactatttttggcctattagtttctaatattaatctccaggtgtaagattttaaagtgcaattaaatgccaaaatctcttctcccttctccctccatcatcgacactggtctagcctcagagtaacccctgttaacaaactaaaatgtacacttcaaaatttttacgtgatagtataaaccaatgtgacttcatgtgatcatatccaggatttttattcgtcgcttattttatgccaaatgtgatcaaattatgcctgtttttctgtatcttgcgttttaaattcttaataaggtcctaaacaaaatttcttatatttctaatggttgaattataatgtgggtttatacattttttacccttttgtcaaagagaattaactttgtttccaggcttttgctact

SEQ ID NO: 784 - DNA, 425 bp, Homo sapiens
  misc_feature (1)..(425): 220684_at
tcctggcccacgatgaaacctgagaggggtgtccccttgccccatcctctgccctaactacagtcgtttacctggtgctgcgtcttgcttttggtttccagctggagaaaagaagacaagaaagtcttgggcatgaaggagctttttgcatctagtgggtgggaggggtcaggtgtgggacatgggagcaggagactccactttcttcctttgtacagtaactttcaaccttttcgttggcatgtgtgttaatccctgatccaaaaagaacaaatacacgtatgttataaccatcagcccgccagggtcagggaaaggactcacctgactttggacagctggcctgggctccccctgctcaaacacagtggggatcagagaaaaggggctggaaaggggggaatggcccacatctcaagaagcaa

SEQ ID NO: 785 - DNA, 444 bp, Homo sapiens
  misc_feature (1)..(444): 220725_x_at
acacaccacaatgccaggctatttttttgtattttcagtagagacagggcttttgccatgtcgcccaggctggtctcgaactcctgagctcaggcaatccactccccctttggcctcccaaagtgctgggattacaggcgccaccgcgcctggccaaaaggcatttcattctttttattttattttattattatactttaagttttagggtacatgtgcacaacgtgcaggtttgttacatacgtatacatgtgccatgttggtgtgctgcacccattaactcatcatttacattaggtgtatctcctaatgctatccttcccccccccaccctccccaccccacgacaggcccaggtgtgtgatgttccctttcctgtgtccaagtgttctcattgttcaattccgacctatgagtgagaacgaaggcatttcattcttgatg

SEQ ID NO: 786 - DNA, 484 bp, Homo sapiens
  misc_feature (1)..(484): 220741_s_at
aatgcgaatgatcctgaagcctcaaagtttcatgatattgatgatgttaagaagttcaaaccgggttacctggaagctactcttaattggtttagattatataaggtaccagatggaaaaccagaaaaccagtttgcttttaatggagaattcaaaaacaaggcttttgctcttgaagttattaaatccactcatcaatgttggaaagcattgcttatgaagaactgtaatggaggagctataaattgcacaaacgtgcagatatctgatagccctttccgttgcactcaagaggaagcaagatcattagttgaatcggtatcatcttcaccaaataaagaaagtaatgaagaagagcaagtgtggcacttccttggcaagtgattgaaacatctgaaattctgctgtcaagattcccatctctaaggactccaagactctttttccccaagtgctagagacaagggggtctatgagcatttac

SEQ ID NO: 787 - DNA, 437 bp, Homo sapiens
  misc_feature (1)..(437): 220807_at
tccagcgcggggatggcgctgtccgcggaggaccgggcgctggtgcgcgccctgtggaagaagctgggcagcaacgtcggcgtctacacgacagaggccctggaaaggaccttcctggctttccccgccacgaagacctacttctcccacctggacctgagccccggctcctcacaagtcagagcccacggccagaaggtggcggacgcgctgagcctcgccgtggagcgcctggacgacctaccccacgcgctgtccgcgctgagccacctgcacgcgtgccagctgcgagtggacccggccagcttccagctcctgggccactgcctgctggtaaccctcgcccggcactaccccggagacttcagccccgcgctgcaggcgtcgctggacaagttcctgagccacgttatctcggcgctggtttccgagtaccg

SEQ ID NO: 788 - DNA, 533 bp, Homo sapiens
  misc_feature (1)..(533): 220890_s_at
agcccaaaggtttgcccgaatggagttaagggagcatggagaaaagaagaaacgctcgcgagaggatgctggagataatgatgacacagagggtgctattggtgtcaggaacaaggtggctggaggaaaaatgaagaagcggaaaggccgttaatcacttttatgaaggctcgagttctgctgttctgtaaaagagaattggagaatgaaacctgctccaacagagatcatgagactgaaattggtcagaattgtgtccagaatgtgctcagctaattcagtattcttccccattctgggttggagtttactgcagagtaattcttacagtgctgatgtcaagactgttactgttcttcgactttgattccttgctcatgacatgagtagggtgtgctcttctgtcacttcacacagaccttttgccttttttagctgcaagtcaaggactaggttgatgatgcccatgacctgtaattgtaaagaagcttggacatctgcaaatgatatttaaaccatcttggcttgtgctt

SEQ ID NO: 789 - DNA, 486 bp, Homo sapiens
  misc_feature (1)..(486): 220933_s_at
gttgtttactgaatcctggtgtgaaagcatatcagatatgtatgaactgctactgctgtacttccgatttacggacatcattttattgctatttgtagacgtgataacatgaacatgagtacctatttatgtgggccttcagtggatgggcagtgccactcaggtctctggggtttccctctctaattttaagtaaattgacatataactactatgcttataaaaatgaagtaaggaaaacaagtagtcctgtttgccactaaaaacattttcaaaggaaaaataaaatgaaagtactttttactttttatgatactcagaaattaggatgaagaacttttaaaattgctgaaggtcaaagaggttatctctgccagtcacaagtgtggctggtgtcattctgggtctgactggagccctcctggactgtttctttaatttcaaaagccctgcagacatagtacctggtcagaactatgcctcggt

SEQ ID NO: 790 - DNA, 542 bp, Homo sapiens
  misc_feature (1)..(542): 220942_x_at
tccatcccgcacttacaacagagtgcctttacacaaacctacggattggcagaaaaagatcctcatatggtcaggtcgcttcaaaaaggaagatgaaatcccagagactgtctcgttggagatgcttgatgctgcaaagaacaagatgcgagtgaagatcagctatctaatgattgccctgacggtggtaggatgcatcttcatggttattgagggcaagaaggctgcccaaagacacgagactttaacaagcttgaacttagaaaagaaagctcgtctgaaagaggaacagctatgaaggccaaaacagagtagcagaggtatccgtgttggctggattttgaaaatccaggaattatgttataacgtgcctgtattaaaaaggatgtggtatgaggatccatttcataaagtatgatttgcccaaacctgtaccatttccgtatttctgctgtagaagtagaaataaattttcttaaataatgactgtgttttattgttttgatccaagtcaagtgtagcctctcagccttttggagaaa

SEQ ID NO: 791 - DNA, 402 bp, Homo sapiens
  misc_feature (1)..(402): 220956_s_at
tctgtctgttgctgaggaccaaggaggagaagagacctttgctgccccatcatgggggctggggttgtcacctggacagggggcagccgtggaggccaccgttaccaactgaagctgggggcctgggtcctaccctgtctggtcatgaccccattaggtatggagagctgggaggaggcattgtcacttcccaccaggatgcaggacttggggttgaggtgagtcatggcctcttgctggcaatggggtgggaggagtacccccaagtcctctcactcctccagcctggaatgtgaagtgactccccaacccctttggccatggcaggcaccttttggactgggctgccactgcttgggcagagtaaaaggtgccaggaggagcatgggtgtggaagtcctg

SEQ ID NO: 792 - DNA, 313 bp, Homo sapiens
  misc_feature (1)..(313): 221004_s_at
agcccaccagcaggagcttggagtttggggagtggggatgagtccgtcaagcacaactgttctctgagtggaaccaaagaagcaaggagctaggacccccagtcctgccccccaggagcacaagcagggtcccctcagtcaaggcagtgggatgggcggctgaggaacggggcaggcaaggtcactgctcagtcacgtccacgggggacgagccgtgggttctgctgagtaggtggagctcattgctttctccaagcttggaactgttttgaaagataacacagagggaaagggagagccacctggtacttgt

SEQ ID NO: 793 - DNA, 316 bp, Homo sapiens
  misc_feature (1)..(316): 221059_s_at
gggctcccaaagcgacaagatcgttagggagagaggcccagggtggggactgggaatttaaggagagctgggaacggatcccttaggttcaggaagcttctgtgcaagctgcgaggatggcttgggccgaagggttgctctgcccgccgcgctagctgtgagctgagcaaagccctgggctcacagcaccccaaaagcctgtggcttcagtcctgcgtctgcaccacccaatcaaaaggatcgttttgttttgtttttaaagaaaggtgagattggcttggttcttcatgagcacatttgatatagctctttttct

SEQ ID NO: 794 - DNA, 513 bp, Homo sapiens
  misc_feature (1)..(513): 221211_s_at
aactgtcagaaacttctgtgcatgtatttatatttgccagagtataaacttttatactctgatttttatccttcaatgattgattatactaagaataaatggtcacatatcctaaaagcttcttcatgaaattattagcagaaaccatgtttgtaaccaaagcacatttgccaatgctaactggctgttgtaataataaacagataaggctgcatttgcttcatgccatgtgacctcacagtaaacatctctgcctttgcctgtgtgtgttctgggggaggggggacatggaaaaatattgtttggacattacttgggtgagtgcccatgaaaacatcagtgaacttgtaactattgttttgttttggatttaaggagatgttttagatcagtaacagctaataggaatatgcgagtaaattcagaattgaaacaatttctccttgttctacctatcaccacattttctcaaattgaactctttgttatatgtccatttctattcatgtaact

SEQ ID NO: 795 - DNA, 323 bp, Homo sapiens
  misc_feature (1)..(323): 221471_at
ttggatatttgaggccatgcttaatatatttatattgcagtatcctttaaaagcaaaaaaaaaaaaatgcatttatattacagttttcctctatgaaagtccttacttatatgatacaagcactgtgttttgtgcttaaactcttcagcggggtagcatcaaagttcttggggaaggatcgtatatgtgggtcccttccctagaagaatggttgctgatatggctactgcttctacatcttgagttttttaatttactttttttacactgtagcattgagactgcttgattcaagtctggtgctttgccagatgtattaattt

SEQ ID NO: 796 - DNA, 455 bp, Homo sapiens
  misc_feature (1)..(455): 221479_s_at
gctttggggctaggcatctatattggaaagcgactgagcacacccttctgccagcacctactgagggaaaggaaaagcccctggaaatgcgtgtgacctgtgaagtggtgtattgtcacagtagcttatttgaacttgagaccattgtaagcatgacccaacctaccaccctgtttttacatatccaattccagtaactctcaaattcaatattttattcaaactctgttgaggcattttactaaccttataccctttttggcctgaagacattttagaatttcctaacagagtttactgttgtttagaaatttgcaagggcttcttttccgcaaatgccaccagcagattataattttgtcagcaatgctattatctctaattagtgccaccagactagacctgtatcattcatggtataaattttactcttgcaacataactaccatctctct

SEQ ID NO: 797 - DNA, 560 bp, Homo sapiens
  misc_feature (1)..(560): 221521_s_at
cagcctctggagagtactcagtctcaggacttctagagaaaggcctggtgcaggcggcttgctgggggatgtgagcgctcaggacgtgatgaggtactcgtggttctggagctctagaaacacttctgatgcatgaaaaatgtgtgatggtgcaaggaatggattcaggatgttgttggagaaacaagtttgtgattagtccttaaaacttagctccctgggacattcttcaattccacatctgtttctagaaaccagccctttttccccccacttttgagaaataaaaaagccttaggtaaataagtcattctccctagcagagccacttgggtctcctgcatggaagccatcacacttgggcaggtgttcagtgactggtaggtgtagatacagcaggagtggccatgtggtccacggctttttaccccttcttgatcctcatttcttgggctgaatttagactctctcacagaggtggctcacagagaaggatggcagatggtgcagccaacaatgctgaccggtgcttatcctctaagccctgatccacaataaaa

SEQ ID NO: 798 - DNA, 519 bp, Homo sapiens
  misc_feature (1)..(519): 221602_s_at
caaggatttcacatcctgatcccgaccatcctgggccttttcctgctggcacttctggggctggtggtgaaaagggccgttgaaaggaggaaagccctctccaggcgggcccgccgactggccgtgaggatgcgcgccctggagagctcccagaggccccgcgggtcgccgcgaccgcgctcccaaaacaacatctacagcgcctgcccgcggcgcgctcgtggagcggacgctgcaggcacaggggaagcccccgttcccggccccggagcgccgttgccccccgccccgctgcaggtgtctgaatctccctggctccatgccccatctctgaagaccagctgtgaatacgtgagcctctaccaccagcctgccgccatgatggaggacagtgattcagatgactacatcaatgttcctgcctgacaactccccagctatcccccaaccccaggctcggactgtggtgccaaggagtctcatctatctgctgatgtccaatacctgcttcatgtgttc

SEQ ID NO: 799 - DNA, 444 bp, Homo sapiens
  misc_feature (1)..(444): 221698_s_at
gacatggaatcagggcagccaagcttgagtttttattttttatttatttatttttttgagatagggtctcactttgttacccagcctagaatcttgtataatatgtaattgtagggaaactgctctcataggaaagttttctgctttttaaatacaaaaatacataaaaatacataaaatctgatgatgaatataaaaaagtaaccaacctcattggaacaagtattaacattttggaatatgttttattagttttgtgatgtactgttttacaatttttaccatttttttcagtaattactgtaaaatggtattattggaatgaaactatatttcctcatgtgctgatttgtcttatttttttcatactttcccactggtgctatttttatttccaatggatatttctgtattactagggaggcatttacagtcctctaatgt

SEQ ID NO: 800 - DNA, 448 bp, Homo sapiens
  misc_feature (1)..(448): 221756_at
ttgctccccaagtgggcctgatttagcaggtggtcctgcgggcgtccaggtcagcaccttcctgtagggcactggggctagggtcacagcccctaactcataaagcaatcaaagaaccattagaaagggctcattaagccttttggacacaggaccccagagaggaaaaagtgacttgcccaaggtcgtaagcaagctactggcatggcaagagcccagcttcctgacggagcgcaacatttctccactgcactgtgctagcagctcagcagggcctctaacctgtgatgtcacactcaagaggccttggcagctcctagccatagagcttcctttccagaacccttccactgcccaatgtggagacaggggttagtggggctttctatggagccatctgctttggggacctagacctcaggtggtctcttggtgttagtgatgctgg

SEQ ID NO: 801 - DNA, 521 bp, Homo sapiens
  misc_feature (1)..(521): 221757_at
  misc_feature (85)..(85): n is a, c, g, or t
  misc_feature (172)..(172): n is a, c, g, or t
tcaccaaccccacctgtgagattgtggatgagaagactgtcgtggtccacaccagccagactccagttgaccctcaggagggcancaccccccttatgggccaggccgggactcctggggcctgagcccccccagtgggcaggagcccatgcagacactggtgcaggacagnccaccctcctacagctaggaggaactaccactttgtgttctggttaaaaccctaccactcccccgcttttttggcgaatcctagtaagagtgacagaagcaggtggccctgtgggctgagggtaaggctgggtagggtcctaacagtgctccttgtccatcccttggagcagattttgtctgtggatggagacagtggcagctcccacagtgatgctgctgctaagggcttccaaacattgcctgcacccctggaactgaaccagggatagacggggagctcccccaggctcctctgtgctttactaagatggcctcagtctccactgtgggcttgagtggcatacact

SEQ ID NO: 802 - DNA, 466 bp, Homo sapiens
  misc_feature (1)..(466): 221831_at
  misc_feature (134)..(134): n is a, c, g, or t
tttatcatctatctgtcagtcagtcaggagcccctgggaaggaaccagcatgtaacatgtttttatcatcttatatggcaaaagggactttgcagataaggatgctgggatgaggcagaacatcctagatgatnccaggtgggccttaaatgtaatcacaggtagtatccttttaagagagagacaaaagatttgactacaggagaaggcaatgtgatgatggaagcagaaactggagttatgtgctctgaggatggaggaaggagccacgagccttcccacacctagaagctgaaaagagcaaggaaatgaactgatcctccctgctctgagagcctctgtaatgaatgcagccctgtggacccattttagactttaagcatccagaactttcgaatagatttctgtttttttaagagccactaagtttgtggcaatctgttaaaccagctgttacctaagccct

SEQ ID NO: 803 - DNA, 523 bp, Homo sapiens
  misc_feature (1)..(523): 221841_s_at
  misc_feature (29)..(29): n is a, c, g, or t
atccgacttgaatattcctggacttacanaatgccaagggggtgactggaagttgtggatatcagggtataaattatatccgtgagttgggggagggaagaccagaattcccttgaattgtgtattgatgcaatataagcataaaagatcaccttgtattctctttaccttctaaaagccattattatgatgttagaagaagaggaagaaattcaggtacagaaaacatgtttaaatagcctaaatgatggtgcttggtgagtcttggttctaaaggtaccaaacaaggaagccaaagttttcaaactgctgcatactttgacaaggaaaatctatatttgtcttccgatcaacatttatgacctaagtcaggtaatatacctggtttacttctttagcatttttatgcagacagtctgttatgcactgtggtttcagatgtgcaataatttgtacaatggtttattcccaagtatgccttaagcagaacaaatgtgtttttctatatagttccttgccttaa

SEQ ID NO: 804 - DNA, 428 bp, Homo sapiens
  misc_feature (1)..(428): 221890_at
  misc_feature (278)..(278): n is a, c, g, or t
  misc_feature (339)..(339): n is a, c, g, or t
ggtacaggagggccagatcacacacatccagtatgaacaaggagccccgttccttcaggagtcccagatccagtatgtgcctgtgtccccaggccagcagcttgtcacacaggctcaacttgaggctgcagcacactcagctgtcacagcagtggctgatgctgccatggcccaagcccagggcctgtttggtacagacgagacagtgcccgaacacattcaacagctgcagcaccagggcatcgagtacgacgtcatcaccctggccgatgactganccccgagggcccaacacagatcatggatttgcggccagctctcctgggggtagggggccanccaggactcacctccctcttcatttaggatctccagatactggatagccagcatcctctcattcccagggagccagacctgtgctgttg

SEQ ID NO: 805 - DNA, 239 bp, Homo sapiens
  misc_feature (1)..(239): 221923_s_at
tagtccatactgagtgtcatcaacaatccagactgaagtcttctattttaatctcaatccccttttctgatttgccacccatgcctcttcaggctggaaacaatctcttggttccctaaagcactttcttctgactgctgtgattcagtgaaccttgccctttgctttctattacttgtgcatttgcctcacctgacaatgttttaaatcgcctttgtatctccttagctgctcaataa

SEQ ID NO: 806 - DNA, 538 bp, Homo sapiens
  misc_feature (1)..(538): 221942_s_at
  misc_feature (107)..(107): n is a, c, g, or t
  misc_feature (169)..(169): n is a, c, g, or t
ctgatgaagttatgtctccccatggagaacctatcaagatgcgaatggactgcactctggatcagttttgctggcgtcgttggagttaaaatgccccgttactgtcnttttggaaacaatgtcactctggctaacaaatttgagtcctgcagtgtaccacgaaaaatcnatgtcagcccaacaacttacagattactcaaagactgtcctggtttcgtgtttacccctcgatcaagggaggaacttccaccaaacttccctagtgaaatccccggaatctgccattttctggatgcttaccaacaaggaacaaactcaaaaccatgcttccaaaagaaagatgtggaagatggcaatgccaattttttaggcaaagcatcaggaatagattagcaacctatatacctatttataagtctttggggtttgactcattgaagatgtgtagagcctctgaaagcactttagggattgtagatggctaacaagcagtattaaaatttcaggagccaagtcacaatctttctcctgtttaaca

SEQ ID NO: 807 - DNA, 557 bp, Homo sapiens
  misc_feature (1)..(557): 222036_s_at
  misc_feature (120)..(120): n is a, c, g, or t
  misc_feature (133)..(133): n is a, c, g, or t
  misc_feature (134)..(134): n is a, c, g, or t
  misc_feature (136)..(136): n is a, c, g, or t
  misc_feature (181)..(181): n is a, c, g, or t
  misc_feature (314)..(314): n is a, c, g, or t
gtatagcagcagggcttttactctgtgtatgcacagatgcagtctggggcatggtttgtgtgctggactttctcatggccatcatcagtttgcttatggatttgatgacaggcatagccngggcatatcaccnnantggtaaagggctagagcctttcttttttatggcacttcttttttngagatagggtcttactctgtcaccctggctagagtacactggtacaatcacggctcaatgtaggcttaacctcctgggctcaggtgtatgtcactatgcccggctactttttgtattttttggtagagacggnttcgccacgttgcccaggctgcaagcgatatgcctaggctcaagcgatctgcccacctcaacttccggaagtgctgagattacaggtgtgagccactgcacccagcctttgttttattttttattttttgagaggtatgattctttctagagattttttctcatggctactattagatcaggaatgggtgattggagattattagattctaggttaacttctaccactttaccctaatacata

SEQ ID NO: 808 - DNA, 316 bp, Homo sapiens
  misc_feature (1)..(316): 222037_at
  misc_feature (46)..(46): n is a, c, g, or t
  misc_feature (59)..(59): n is a, c, g, or t
  misc_feature (60)..(60): n is a, c, g, or t
  misc_feature (62)..(62): n is a, c, g, or t
  misc_feature (107)..(107): n is a, c, g, or t
  misc_feature (240)..(240): n is a, c, g, or t
atggccatcatcagtttgcttatggatttgatgacaggcatagccngggcatatcaccnnantggtaaagggctagagcctttcttttttatggcacttcttttttngagatagggtcttactctgtcaccctggctagagtacactggtacaatcacggctcaatgtaggcttaacctcctgggctcaggtgtatgtcactatgcccggctactttttgtattttttggtagagacggnttcgccacgttgcccaggctgcaagcgatatgcctaggctcaagcgatctgcccacctcaacttccggaagtgctg

SEQ ID NO: 809 - DNA, 462 bp, Homo sapiens
  misc_feature (1)..(462): 222067_x_at
attaacgctacgatgcctgaacctaccaagtctgctcctgccccaaagaagggctccaagaaggcggtgactaaggctcagaagaaggacgggaagaagcgcaagcgcagccgcaaggagagctattcagtgtatgtgtacaaggtgctgaagcaggtccatcccgacaccggcatctcttccaaggcaatggggatcatgaattccttcgtcaacgacatcttcgagcgcatcgcaggcgaggcttcccgcctggcgcattacaacaagcgctcgaccatcacctccagggagatccagacggccgtgcgcctgctgcttccgggggagctggccaagcacgccgtgtcggagggcaccaaggccgtcaccaagtacaccagttccaagtaactttgccaagtaagcatctttacacctaatcccaaaggctcttttaagagccacgcatgttttcaataa

SEQ ID NO: 810 - DNA, 324 bp, Homo sapiens
  misc_feature (1)..(324): 222142_at
  misc_feature (231)..(231): n is a, c, g, or t
tctctcttgtggtgcagagttgcattgggttttctacattttcccactgagtcttccctgttgtaaaagggagttagaaagctgctaactaggattaagtttatagtcagggaacagtgttataatctcttcctagctaatgggcttactcaaagattcaccacctgactttgaatttgtcagcagcatactgtaaacagctgtaatgttcagaggcttgcaggaaaaaancagagcatacttcagattgtactccatttaccttaacccctccaaaggaaataacagctatttcattatgtgcaatgtgttacaccctttcaa

SEQ ID NO: 811 - DNA, 491 bp, Homo sapiens
  misc_feature (1)..(491): 222150_s_at
taatcttgctcattaaccttactcctttgagaattctttaacaatatttaaaattggtaacaaaaatagtttagccataattgtttagccatgtgagtttcaggttggtacacgttcagacagaactgctgtatcacattccaattttgaatagccagtgagcaatcaagtgtagagaaatgataaatggcctaagaaggcatacagtggcataaacgatgctcttcctagtagcttaataggccacaagctagtttctgttgccctctgaaataaaatatgctttaaaaatgtagggaccagtgcttagaaaagcaaaaactaggtgtgtcattgaaataataggcataaaaattaaatgttacataagacccctatttggaaaaagggtccttttaaaaactgaatttgtactaaatcagatttgccatgtccagtacagaataatttgtacttagtatttgcagcagggtttgtctttgtgaattcag

SEQ ID NO: 812 - DNA, 254 bp, Homo sapiens
  misc_feature (1)..(254): 222294_s_at
attagctatagattccactggccttaaacatacaattaagtgtatacatgatatagtgcacacacaaaagccacctttaattattgaaataacctgtattctttttggaaatcatttaagtttggtattgaagtactatattttttgtgcatcaatgtatttttctatttacaagcctatgtaaaagtgaagtgtatcttcagtgaaccatgtgccaattaagctgtaataaaaaagtggtctagtctgtcaaa

SEQ ID NO: 813 - DNA, 431 bp, Homo sapiens
  misc_feature (1)..(431): 222315_at
ggcctgcagtggatagagcctagcagatcctggacaatactatcctaaaagctacatctctgacagtgatttccagcgactttgtcaacacggtccgcccccagcaagtataagaggaaaaacaacaaatgtctttactgccttgtctttcccccttgccacttgtcattattcaagttttgtaagttcctgatttccattcagtgcagctgcaaggttaccagctgtgcttgcgttgcaagacctgtcacagtttgattaactgccttctttctgcttctgtaagccctcttgcctgccccgcgagtttcacaccatcaaattcctgctgcaccattcaaactagccaaccccctttcagaagtgtgtataaaagtcaagccccctgtctttcttcggggctcatgctaggcccgagtgcattcaataaa

SEQ ID NO: 814 - DNA, 478 bp, Homo sapiens
  misc_feature (1)..(478): 266_s_at
ttcacaaacttttatactctttctgtatatacattttttttctttaaaaaacaactatggatcagaatagcaacatttagaacactttttgttatcagtcaatatttttagatagttagaacctggtcctaagcctaaaagtgggcttgattctgcagtaaatcttttacaactgcctcgacacacataaacctttttaaaaatagacactccccgaagtcttttgtttgtatggtcacacactgatgcttagatgttccagtaatctaatatggccacagtagtcttgatgaccaaagtcctttttttccatctttagaaaactacatgggaacaaacagatcgaacagttttgaagctactgtgtgtgtgaatgaacactcttgctttattccagaatgctgtacatctattttggattgtatattgtggttgtgtatttacgctttgattcatagtaacttcttatggaattgat

SEQ ID NO: 815 - DNA, 485 bp, Homo sapiens
  misc_feature (1)..(485): 32032_at
  misc_feature (26)..(26): n is a, c, g, or t
  misc_feature (42)..(42): n is a, c, g, or t
  misc_feature (48)..(48): n is a, c, g, or t
  misc_feature (59)..(59): n is a, c, g, or t
  misc_feature (282)..(282): n is a, c, g, or t
  misc_feature (283)..(283): n is a, c, g, or t
  misc_feature (284)..(284): n is a, c, g, or t
  misc_feature (285)..(285): n is a, c, g, or t
  misc_feature (286)..(286): n is a, c, g, or t
  misc_feature (287)..(287): n is a, c, g, or t
  misc_feature (288)..(288): n is a, c, g, or t
  misc_feature (289)..(289): n is a, c, g, or t
  misc_feature (290)..(290): n is a, c, g, or t
  misc_feature (291)..(291): n is a, c, g, or t
  misc_feature (292)..(292): n is a, c, g, or t
  misc_feature (293)..(293): n is a, c, g, or t
  misc_feature (294)..(294): n is a, c, g, or t
  misc_feature (295)..(295): n is a, c, g, or t
  misc_feature (296)..(296): n is a, c, g, or t
  misc_feature (297)..(297): n is a, c, g, or t
  misc_feature (298)..(298): n is a, c, g, or t
  misc_feature (299)..(299): n is a, c, g, or t
  misc_feature (300)..(300): n is a, c, g, or t
  misc_feature (301)..(301): n is a, c, g, or t
  misc_feature (302)..(302): n is a, c, g, or t
  misc_feature (303)..(303): n is a, c, g, or t
  misc_feature (304)..(304): n is a, c, g, or t
  misc_feature (305)..(305): n is a, c, g, or t
  misc_feature (306)..(306): n is a, c, g, or t
  misc_feature (307)..(307): n is a, c, g, or t
  misc_feature (308)..(308): n is a, c, g, or t
  misc_feature (309)..(309): n is a, c, g, or t
  misc_feature (310)..(310): n is a, c, g, or t
  misc_feature (311)..(311): n is a, c, g, or t
  misc_feature (312)..(312): n is a, c, g, or t
  misc_feature (313)..(313): n is a, c, g, or t
  misc_feature (314)..(314): n is a, c, g, or t
  misc_feature (315)..(315): n is a, c, g, or t
  misc_feature (316)..(316): n is a, c, g, or t
  misc_feature (317)..(317): n is a, c, g, or t
  misc_feature (318)..(318): n is a, c, g, or t
  misc_feature (319)..(319): n is a, c, g, or t
  misc_feature (320)..(320): n is a, c, g, or t
  misc_feature (321)..(321): n is a, c, g, or t
  misc_feature (322)..(322): n is a, c, g, or t
  misc_feature (323)..(323): n is a, c, g, or t
  misc_feature (324)..(324): n is a, c, g, or t
  misc_feature (325)..(325): n is a, c, g, or t
  misc_feature (326)..(326): n is a, c, g, or t
  misc_feature (327)..(327): n is a, c, g, or t
  misc_feature (328)..(328): n is a, c, g, or t
  misc_feature (329)..(329): n is a, c, g, or t
  misc_feature (330)..(330): n is a, c, g, or t
  misc_feature (331)..(331): n is a, c, g, or t
  misc_feature (332)..(332): n is a, c, g, or t
  misc_feature (333)..(333): n is a, c, g, or t
  misc_feature (334)..(334): n is a, c, g, or t
  misc_feature (335)..(335): n is a, c, g, or t
  misc_feature (336)..(336): n is a, c, g, or t
  misc_feature (337)..(337): n is a, c, g, or t
  misc_feature (338)..(338): n is a, c, g, or t
  misc_feature (339)..(339): n is a, c, g, or t
  misc_feature (340)..(340): n is a, c, g, or t
  misc_feature (341)..(341): n is a, c, g, or t
  misc_feature (342)..(342): n is a, c, g, or t
  misc_feature (343)..(343): n is a, c, g, or t
  misc_feature (344)..(344): n is a, c, g, or t
  misc_feature (345)..(345): n is a, c, g, or t
  misc_feature (346)..(346): n is a, c, g, or t
  misc_feature (347)..(347): n is a, c, g, or t
  misc_feature (348)..(348): n is a, c, g, or t
  misc_feature (349)..(349): n is a, c, g, or t
  misc_feature (350)..(350): n is a, c, g, or t
  misc_feature (351)..(351): n is a, c, g, or t
  misc_feature (352)..(352): n is a, c, g, or t
  misc_feature (353)..(353): n is a, c, g, or t
  misc_feature (354)..(354): n is a, c, g, or t
  misc_feature (355)..(355): n is a, c, g, or t
tacagcgccttgtgagcaggacggcnagcaagtacacagacngggccntgcgggccagntacacaccatccccagcacgctccacccacctcaagaccccggccagtgggctgcagacccccacaagcacaccggcgcctggctctgccacacgcacccctctcacacaggacccggcctccatcacggacaacctgctgcagctccctgcccggcgcaaagcttcggacttcttttagagccaggcctgggctgggctcatagacgcttcacagagcctgnnnnnnnnnnnnnnnnnnnnnnnnnnnnnnnnnnnnnnnnnnnnnnnnnnnnnnnnnnnnnnnnnnnnnnnnnnaccaggagtcactggagaaaggggctgtgctggggccagactggcacaaggcactcgtgcccacaccacaccccagggccttgccaagctgtttgctgtttaattggccccttgaactgtcattaaagaa

SEQ ID NO: 816 - DNA, 532 bp, Homo sapiens
  misc_feature (1)..(532): 35626_at
  misc_feature (154)..(154): n is a, c, g, or t
  misc_feature (155)..(155): n is a, c, g, or t
  misc_feature (156)..(156): n is a, c, g, or t
  misc_feature (157)..(157): n is a, c, g, or t
  misc_feature (158)..(158): n is a, c, g, or t
  misc_feature (159)..(159): n is a, c, g, or t
  misc_feature (160)..(160): n is a, c, g, or t
  misc_feature (161)..(161): n is a, c, g, or t
  misc_feature (162)..(162): n is a, c, g, or t
  misc_feature (163)..(163): n is a, c, g, or t
  misc_feature (164)..(164): n is a, c, g, or t
  misc_feature (165)..(165): n is a, c, g, or t
  misc_feature (166)..(166): n is a, c, g, or t
  misc_feature (167)..(167): n is a, c, g, or t
  misc_feature (168)..(168): n is a, c, g, or t
  misc_feature (169)..(169): n is a, c, g, or t
  misc_feature (170)..(170): n is a, c, g, or t
  misc_feature (171)..(171): n is a, c, g, or t
  misc_feature (172)..(172): n is a, c, g, or t
  misc_feature (173)..(173): n is a, c, g, or t
  misc_feature (174)..(174): n is a, c, g, or t
  misc_feature (175)..(175): n is a, c, g, or t
  misc_feature (176)..(176): n is a, c, g, or t
  misc_feature (177)..(177): n is a, c, g, or t
  misc_feature (178)..(178): n is a, c, g, or t
  misc_feature (179)..(179): n is a, c, g, or t
  misc_feature (180)..(180): n is a, c, g, or t
  misc_feature (181)..(181): n is a, c, g, or t
  misc_feature (182)..(182): n is a, c, g, or t
  misc_feature (183)..(183): n is a, c, g, or t
  misc_feature (184)..(184): n is a, c, g, or t
  misc_feature (185)..(185): n is a, c, g, or t
  misc_feature (186)..(186): n is a, c, g, or t
  misc_feature (187)..(187): n is a, c, g, or t
  misc_feature (188)..(188): n is a, c, g, or t
  misc_feature (189)..(189): n is a, c, g, or t
  misc_feature (190)..(190): n is a, c, g, or t
  misc_feature (191)..(191): n is a, c, g, or t
  misc_feature (192)..(192): n is a, c, g, or t
  misc_feature (193)..(193): n is a, c, g, or t
  misc_feature (194)..(194): n is a, c, g, or t
  misc_feature (195)..(195): n is a, c, g, or t
  misc_feature (196)..(196): n is a, c, g, or t
  misc_feature (197)..(197): n is a, c, g, or t
  misc_feature (198)..(198): n is a, c, g, or t
  misc_feature (199)..(199): n is a, c, g, or t
  misc_feature (200)..(200): n is a, c, g, or t
  misc_feature (201)..(201): n is a, c, g, or t
  misc_feature (202)..(202): n is a, c, g, or t
  misc_feature (203)..(203): n is a, c, g, or t
  misc_feature (204)..(204): n is a, c, g, or t
  misc_feature (205)..(205): n is a, c, g, or t
  misc_feature (206)..(206): n is a, c, g, or t
  misc_feature (207)..(207): n is a, c, g, or t
  misc_feature (208)..(208): n is a, c, g, or t
  misc_feature (209)..(209): n is a, c, g, or t
  misc_feature (210)..(210): n is a, c, g, or t
  misc_feature (211)..(211): n is a, c, g, or t
  misc_feature (212)..(212): n is a, c, g, or t
  misc_feature (213)..(213): n is a, c, g, or t
  misc_feature (214)..(214): n is a, c, g, or t
  misc_feature (215)..(215): n is a, c, g, or t
  misc_feature (216)..(216): n is a, c, g, or t
  misc_feature (217)..(217): n is a, c, g, or t
  misc_feature (218)..(218): n is a, c, g, or t
  misc_feature (219)..(219): n is a, c, g, or t
  misc_feature (220)..(220): n is a, c, g, or t
  misc_feature (221)..(221): n is a, c, g, or t
  misc_feature (222)..(222): n is a, c, g, or t
  misc_feature (223)..(223): n is a, c, g, or t
  misc_feature (224)..(224): n is a, c, g, or t
  misc_feature (225)..(225): n is a, c, g, or t
  misc_feature (226)..(226): n is a, c, g, or t
  misc_feature (227)..(227): n is a, c, g, or t
  misc_feature (228)..(228): n is a, c, g, or t
  misc_feature (229)..(229): n is a, c, g, or t
  misc_feature (230)..(230): n is a, c, g, or t
  misc_feature (231)..(231): n is a, c, g, or t
  misc_feature (232)..(232): n is a, c, g, or t
  misc_feature (233)..(233): n is a, c, g, or t
  misc_feature (234)..(234): n is a, c, g, or t
  misc_feature (235)..(235): n is a, c, g, or t
  misc_feature (236)..(236): n is a, c, g, or t
  misc_feature (237)..(237): n is a, c, g, or t
  misc_feature (238)..(238): n is a, c, g, or t
  misc_feature (239)..(239): n is a, c, g, or t
  misc_feature (240)..(240): n is a, c, g, or t
  misc_feature (247)..(247): n is a, c, g, or t
  misc_feature (254)..(254): n is a, c, g, or t
tccccaggcaggtttcagctgattggcagcaggctccctgagtgatgagcttgaacctgtggtgtttctgggcagaagcttatcttttttgagagtgtccgaagatgaaggcatggcgatgcccgtcctctggcttgggttaattcttcggtgnnnnnnnnnnnnnnnnnnnnnnnnnnnnnnnnnnnnnnnnnnnnnnnnnnnnnnnnnnnnnnnnnnnnnnnnnnnnnnnnnnnnnnncctctgncttgggntaattcttcggtgacactggcgttgctgggtggcgatgcccgtcctctggcttgggttaattcttggatgacgtcggcgttgctgggagaatgtgccgttcctgccctgcctccacccacctcgggagcagaagcccggcctggacacccctcggcctggacacccctcgaaggagagggcgcttccttgagtaggtgggctccccttgcccttccctccctatcactccatactggggtgggctggaggaggccacaggccagctattgtaaaagct

SEQ ID NO: 817 - DNA, 535 bp, Homo sapiens
  misc_feature (1)..(535): 36711_at
  misc_feature (39)..(39): n is a, c, g, or t
  misc_feature (43)..(43): n is a, c, g, or t
  misc_feature (44)..(44): n is a, c, g, or t
  misc_feature (53)..(53): n is a, c, g, or t
  misc_feature (62)..(62): n is a, c, g, or t
  misc_feature (70)..(70): n is a, c, g, or t
  misc_feature (74)..(74): n is a, c, g, or t
  misc_feature (86)..(86): n is a, c, g, or t
  misc_feature (113)..(113): n is a, c, g, or t
  misc_feature (124)..(124): n is a, c, g, or t
  misc_feature (127)..(127): n is a, c, g, or t
  misc_feature (142)..(142): n is a, c, g, or t
  misc_feature (148)..(148): n is a, c, g, or t
  misc_feature (171)..(171): n is a, c, g, or t
  misc_feature (172)..(172): n is a, c, g, or t
  misc_feature (173)..(173): n is a, c, g, or t
  misc_feature (174)..(174): n is a, c, g, or t
  misc_feature (175)..(175): n is a, c, g, or t
  misc_feature (176)..(176): n is a, c, g, or t
  misc_feature (177)..(177): n is a, c, g, or t
  misc_feature (178)..(178): n is a, c, g, or t
  misc_feature (179)..(179): n is a, c, g, or t
  misc_feature (180)..(180): n is a, c, g, or t
  misc_feature (181)..(181): n is a, c, g, or t
  misc_feature (182)..(182): n is a, c, g, or t
  misc_feature (183)..(183): n is a, c, g, or t
  misc_feature (184)..(184): n is a, c, g, or t
  misc_feature (185)..(185): n is a, c, g, or t
  misc_feature (186)..(186): n is a, c, g, or t
  misc_feature (187)..(187): n is a, c, g, or t
  misc_feature (188)..(188): n is a, c, g, or t
  misc_feature (189)..(189): n is a, c, g, or t
  misc_feature (190)..(190): n is a, c, g, or t
  misc_feature (191)..(191): n is a, c, g, or t
  misc_feature (192)..(192): n is a, c, g, or t
  misc_feature (193)..(193): n is a, c, g, or t
  misc_feature (194)..(194): n is a, c, g, or t
  misc_feature (195)..(195): n is a, c, g, or t
  misc_feature (196)..(196): n is a, c, g, or t
  misc_feature (197)..(197): n is a, c, g, or t
  misc_feature (198)..(198): n is a, c, g, or t
  misc_feature (199)..(199): n is a, c, g, or t
  misc_feature (200)..(200): n is a, c, g, or t
  misc_feature (201)..(201): n is a, c, g, or t
  misc_feature (202)..(202): n is a, c, g, or t
  misc_feature (203)..(203): n is a, c, g, or t
  misc_feature (204)..(204): n is a, c, g, or t
  misc_feature (205)..(205): n is a, c, g, or t
  misc_feature (206)..(206): n is a, c, g, or t
  misc_feature (207)..(207): n is a, c, g, or t
  misc_feature (208)..(208): n is a, c, g, or t
  misc_feature (209)..(209): n is a, c, g, or t
  misc_feature (210)..(210): n is a, c, g, or t
  misc_feature (211)..(211): n is a, c, g, or t
  misc_feature (212)..(212): n is a, c, g, or t
  misc_feature (213)..(213): n is a, c, g, or t
  misc_feature (214)..(214): n is a, c, g, or t
  misc_feature (215)..(215): n is a, c, g, or t
  misc_feature (216)..(216): n is a, c, g, or t
  misc_feature (217)..(217): n is a, c, g, or t
  misc_feature (218)..(218): n is a, c, g, or t
  misc_feature (219)..(219): n is a, c, g, or t
  misc_feature (220)..(220): n is a, c, g, or t
  misc_feature (221)..(221): n is a, c, g, or t
  misc_feature (222)..(222): n is a, c, g, or t
  misc_feature (223)..(223): n is a, c, g, or t
  misc_feature (224)..(224): n is a, c, g, or t
  misc_feature (225)..(225): n is a, c, g, or t
  misc_feature (226)..(226): n is a, c, g, or t
  misc_feature (227)..(227): n is a, c, g, or t
  misc_feature (228)..(228): n is a, c, g, or t
  misc_feature (229)..(229): n is a, c, g, or t
  misc_feature (230)..(230): n is a, c, g, or t
  misc_feature (231)..(231): n is a, c, g, or t
  misc_feature (232)..(232): n is a, c, g, or t
  misc_feature (233)..(233): n is a, c, g, or t
  misc_feature (234)..(234): n is a, c, g, or t
  misc_feature (235)..(235): n is a, c, g, or t
  misc_feature (236)..(236): n is a, c, g, or t
  misc_feature (237)..(237): n is a, c, g, or t
  misc_feature (238)..(238): n is a, c, g, or t
  misc_feature (239)..(239): n is a, c, g, or t
  misc_feature (240)..(240): n is a, c, g, or t
  misc_feature (241)..(241): n is a, c, g, or t
  misc_feature (242)..(242): n is a, c, g, or t
  misc_feature (243)..(243): n is a, c, g, or t
  misc_feature (244)..(244): n is a, c, g, or t
  misc_feature (245)..(245): n is a, c, g, or t
  misc_feature (246)..(246): n is a, c, g, or t
  misc_feature (247)..(247): n is a, c, g, or t
  misc_feature (248)..(248): n is a, c, g, or t
  misc_feature (249)..(249): n is a, c, g, or t
  misc_feature (250)..(250): n is a, c, g, or t
  misc_feature (251)..(251): n is a, c, g, or t
  misc_feature (252)..(252): n is a, c, g, or t
  misc_feature (253)..(253): n is a, c, g, or t
  misc_feature (254)..(254): n is a, c, g, or t
  misc_feature (255)..(255): n is a, c, g, or t
  misc_feature (256)..(256): n is a, c, g, or t
  misc_feature (257)..(257): n is a, c, g, or t
  misc_feature (258)..(258): n is a, c, g, or t
  misc_feature (259)..(259): n is a, c, g, or t
  misc_feature (260)..(260): n is a, c, g, or t
  misc_feature (261)..(261): n is a, c, g, or t
  misc_feature (262)..(262): n is a, c, g, or t
  misc_feature (263)..(263): n is a, c, g, or t
  misc_feature (264)..(264): n is a, c, g, or t
  misc_feature (265)..(265): n is a, c, g, or t
  misc_feature (266)..(266): n is a, c, g, or t
  misc_feature (267)..(267): n is a, c, g, or t
  misc_feature (268)..(268): n is a, c, g, or t
  misc_feature (269)..(269): n is a, c, g, or t
  misc_feature (270)..(270): n is a, c, g, or t
  misc_feature (271)..(271): n is a, c, g, or t
  misc_feature (272)..(272): n is a, c, g, or t
  misc_feature (273)..(273): n is a, c, g, or t
  misc_feature (274)..(274): n is a, c, g, or t
  misc_feature (275)..(275): n is a, c, g, or t
  misc_feature (276)..(276): n is a, c, g, or t
  misc_feature (277)..(277): n is a, c, g, or t
  misc_feature (278)..(278): n is a, c, g, or t
  misc_feature (279)..(279): n is a, c, g, or t
  misc_feature (280)..(280): n is a, c, g, or t
  misc_feature (281)..(281): n is a, c, g, or t
  misc_feature (282)..(282): n is a, c, g, or t
  misc_feature (283)..(283): n is a, c, g, or t
  misc_feature (284)..(284): n is a, c, g, or t
  misc_feature (285)..(285): n is a, c, g, or t
  misc_feature (286)..(286): n is a, c, g, or t
  misc_feature (287)..(287): n is a, c, g, or t
  misc_feature (288)..(288): n is a, c, g, or t
  misc_feature (289)..(289): n is a, c, g, or t
  misc_feature (290)..(290): n is a, c, g, or t
  misc_feature (291)..(291): n is a, c, g, or t
  misc_feature (292)..(292): n is a, c, g, or t
  misc_feature (293)..(293): n is a, c, g, or t
  misc_feature (294)..(294): n is a, c, g, or t
  misc_feature (295)..(295): n is a, c, g, or t
  misc_feature (296)..(296): n is a, c, g, or t
  misc_feature (297)..(297): n is a, c, g, or t
  misc_feature (298)..(298): n is a, c, g, or t
  misc_feature (299)..(299): n is a, c, g, or t
  misc_feature (300)..(300): n is a, c, g, or t
  misc_feature (301)..(301): n is a, c, g, or t
  misc_feature (302)..(302): n is a, c, g, or t
  misc_feature (303)..(303): n is a, c, g, or t
  misc_feature (304)..(304): n is a, c, g, or t
  misc_feature (305)..(305): n is a, c, g, or t
  misc_feature (306)..(306): n is a, c, g, or t
  misc_feature (307)..(307): n is a, c, g, or t
  misc_feature (308)..(308): n is a, c, g, or t
  misc_feature (309)..(309): n is a, c, g, or t
  misc_feature (310)..(310): n is a, c, g, or t
  misc_feature (311)..(311): n is a, c, g, or t
  misc_feature (312)..(312): n is a, c, g, or t
  misc_feature (313)..(313): n is a, c, g, or t
  misc_feature (314)..(314): n is a, c, g, or t
  misc_feature (315)..(315): n is a, c, g, or t
  misc_feature (316)..(316): n is a, c, g, or t
  misc_feature (317)..(317): n is a, c, g, or t
  misc_feature (318)..(318): n is a, c, g, or t
  misc_feature (319)..(319): n is a, c, g, or t
  misc_feature (320)..(320): n is a, c, g, or t
  misc_feature (321)..(321): n is a, c, g, or t
  misc_feature (322)..(322): n is a, c, g, or t
  misc_feature (323)..(323): n is a, c, g, or t
  misc_feature (324)..(324): n is a, c, g, or t
  misc_feature (325)..(325): n is a, c, g, or t
  misc_feature (326)..(326): n is a, c, g, or t
  misc_feature (327)..(327): n is a, c, g, or t
  misc_feature (328)..(328): n is a, c, g, or t
  misc_feature (329)..(329): n is a, c, g, or t
  misc_feature (330)..(330): n is a, c, g, or t
  misc_feature (331)..(331): n is a, c, g, or t
  misc_feature (332)..(332): n is a, c, g, or t
  misc_feature (333)..(333): n is a, c, g, or t
  misc_feature (334)..(334): n is a, c, g, or t
  misc_feature (335)..(335): n is a, c, g, or t
  misc_feature (336)..(336): n is a, c, g, or t
  misc_feature (337)..(337): n is a, c, g, or t
  misc_feature (338)..(338): n is a, c, g, or t
  misc_feature (339)..(339): n is a, c, g, or t
  misc_feature (340)..(340): n is a, c, g, or t
  misc_feature (341)..(341): n is a, c, g, or t
  misc_feature (342)..(342): n is a, c, g, or t
  misc_feature (343)..(343): n is a, c, g, or t
  misc_feature (344)..(344): n is a, c, g, or t
  misc_feature (345)..(345): n is a, c, g, or t
  misc_feature (346)..(346): n is a, c, g, or t
  misc_feature (347)..(347): n is a, c, g, or t
  misc_feature (348)..(348): n is a, c, g, or t
  misc_feature (349)..(349): n is a, c, g, or t
  misc_feature (350)..(350): n is a, c, g, or t
  misc_feature (351)..(351): n is a, c, g, or t
  misc_feature (352)..(352): n is a, c, g, or t
  misc_feature (353)..(353): n is a, c, g, or t
  misc_feature (354)..(354): n is a, c, g, or t
  misc_feature (355)..(355): n is a, c, g, or t
  misc_feature (356)..(356): n is a, c, g, or t
  misc_feature (357)..(357): n is a, c, g, or t
  misc_feature (358)..(358): n is a, c, g, or t
  misc_feature (359)..(359): n is a, c, g, or t
  misc_feature (360)..(360): n is a, c, g, or t
  misc_feature (361)..(361): n is a, c, g, or t
  misc_feature (362)..(362): n is a, c, g, or t
  misc_feature (363)..(363): n is a, c, g, or t
  misc_feature (364)..(364): n is a, c, g, or t
  misc_feature (365)..(365): n is a, c, g, or t
  misc_feature (366)..(366): n is a, c, g, or t
  misc_feature (367)..(367): n is a, c, g, or t
  misc_feature (368)..(368): n is a, c, g, or t
  misc_feature (369)..(369): n is a, c, g, or t
  misc_feature (370)..(370): n is a, c, g, or t
  misc_feature (371)..(371): n is a, c, g, or t
  misc_feature (372)..(372): n is a, c, g, or t
  misc_feature (373)..(373): n is a, c, g, or t
  misc_feature (374)..(374): n is a, c, g, or t
  misc_feature (375)..(375): n is a, c, g, or t
  misc_feature (376)..(376): n is a, c, g, or t
  misc_feature (377)..(377): n is a, c, g, or t
  misc_feature (378)..(378): n is a, c, g, or t
  misc_feature (379)..(379): n is a, c, g, or t
  misc_feature (380)..(380): n is a, c, g, or t
  misc_feature (381)..(381): n is a, c, g, or t
  misc_feature (382)..(382): n is a, c, g, or t
  misc_feature (383)..(383): n is a, c, g, or t
  misc_feature (384)..(384): n is a, c, g, or t
  misc_feature (385)..(385): n is a, c, g, or t
  misc_feature (386)..(386): n is a, c, g, or t
  misc_feature (387)..(387): n is a, c, g, or t
  misc_feature (388)..(388): n is a, c, g, or t
  misc_feature (389)..(389): n is a, c, g, or t
  misc_feature (390)..(390): n is a, c, g, or t
  misc_feature (391)..(391): n is a, c, g, or t
  misc_feature (392)..(392): n is a, c, g, or t
  misc_feature (393)..(393): n is a, c, g, or t
  misc_feature (394)..(394): n is a, c, g, or t
  misc_feature (395)..(395): n is a, c, g, or t
  misc_feature (396)..(396): n is a, c, g, or t
  misc_feature (397)..(397): n is a, c, g, or t
  misc_feature (398)..(398): n is a, c, g, or t
  misc_feature (399)..(399): n is a, c, g, or t
  misc_feature (400)..(400): n is a, c, g, or t
  misc_feature (401)..(401): n is a, c, g, or t
  misc_feature (402)..(402): n is a, c, g, or t
  misc_feature (403)..(403): n is a, c, g, or t
  misc_feature (404)..(404): n is a, c, g, or t
  misc_feature (405)..(405): n is a, c, g, or t
  misc_feature (406)..(406): n is a, c, g, or t
  misc_feature (407)..(407): n is a, c, g, or t
  misc_feature (408)..(408): n is a, c, g, or t
  misc_feature (409)..(409): n is a, c, g, or t
  misc_feature (410)..(410): n is a, c, g, or t
  misc_feature (411)..(411): n is a, c, g, or t
  misc_feature (412)..(412): n is a, c, g, or t
  misc_feature (413)..(413): n is a, c, g, or t
  misc_feature (414)..(414): n is a, c, g, or t
  misc_feature (415)..(415): n is a, c, g, or t
  misc_feature (416)..(416): n is a, c, g, or t
  misc_feature (417)..(417): n is a, c, g, or t
  misc_feature (418)..(418): n is a, c, g, or t
  misc_feature (419)..(419): n is a, c, g, or t
  misc_feature (420)..(420): n is a, c, g, or t
  misc_feature (421)..(421): n is a, c, g, or t
  misc_feature (422)..(422): n is a, c, g, or t
  misc_feature (423)..(423): n is a, c, g, or t
  misc_feature (424)..(424): n is a, c, g, or t
  misc_feature (425)..(425): n is a, c, g, or t
  misc_feature (426)..(426): n is a, c, g, or t
  misc_feature (427)..(427): n is a, c, g, or t
  misc_feature (428)..(428): n is a, c, g, or t
  misc_feature (429)..(429): n is a, c, g, or t
  misc_feature (430)..(430): n is a, c, g, or t
  misc_feature (431)..(431): n is a, c, g, or t
  misc_feature (432)..(432): n is a, c, g, or t
  misc_feature (433)..(433): n is a, c, g, or t
  misc_feature (434)..(434): n is a, c, g, or t
  misc_feature (435)..(435): n is a, c, g, or t
  misc_feature (436)..(436): n is a, c, g, or t
  misc_feature (437)..(437): n is a, c, g, or t
  misc_feature (438)..(438): n is a, c, g, or t
  misc_feature (439)..(439): n is a, c, g, or t
  misc_feature (440)..(440): n is a, c, g, or t
  misc_feature (441)..(441): n is a, c, g, or t
  misc_feature (442)..(442): n is a, c, g, or t
  misc_feature (443)..(443): n is a, c, g, or t
  misc_feature (444)..(444): n is a, c, g, or t
  misc_feature (445)..(445): n is a, c, g, or t
  misc_feature (446)..(446): n is a, c, g, or t
  misc_feature (447)..(447): n is a, c, g, or t
  misc_feature (448)..(448): n is a, c, g, or t
  misc_feature (449)..(449): n is a, c, g, or t
  misc_feature (450)..(450): n is a, c, g, or t
  misc_feature (451)..(451): n is a, c, g, or t
  misc_feature (452)..(452): n is a, c, g, or t
  misc_feature (453)..(453): n is a, c, g, or t
  misc_feature (454)..(454): n is a, c, g, or t
  misc_feature (455)..(455): n is a, c, g, or t
  misc_feature (456)..(456): n is a, c, g, or t
  misc_feature (457)..(457): n is a, c, g, or t
  misc_feature (458)..(458): n is a, c, g, or t
  misc_feature (459)..(459): n is a, c, g, or t
  misc_feature (460)..(460): n is a, c, g, or t
  misc_feature (461)..(461): n is a, c, g, or t
  misc_feature (462)..(462): n is a, c, g, or t
  misc_feature (463)..(463): n is a, c, g, or t
  misc_feature (464)..(464): n is a, c, g, or t
  misc_feature (465)..(465): n is a, c, g, or t
ttgcacggatctaagttattctccccagccagagcccgngctnnctgctcccngggaaaagntggcgtantggncctgagctgggntttatattttatatctgcaaataaatnacattttatcntanatttagggaaagccngagagnaacaacaaaaaatgtttaagccnnnnnnnnnnnnnnnnnnnnnnnnnnnnnnnnnnnnnnnnnnnnnnnnnnnnnnnnnnnnnnnnnnnnnnnnnnnnnnnnnnnnnnnnnnnnnnnnnnnnnnnnnnnnnnnnnnnnnnnnnnnnnnnnnnnnnnnnnnnnnnnnnnnnnnnnnnnnnnnnnnnnnnnnnnnnnnnnnnnnnnnnnnnnnnnnnnnnnnnnnnnnnnnnnnnnnnnnnnnnnnnnnnnnnnnnnnnnnnnnnnnnnnnnnnnnnnnnnnnnnnnnnnnnnnnnnnnnnnnnnnnnnnnnnnnnnnntattgcccggctcctagaatttatttatttcctgacttacagcaagcgagttatcgtcttctgtattttg

SEQ ID NO: 818 - DNA, 450 bp, Homo sapiens
  misc_feature (1)..(450): 37145_at
  misc_feature (41)..(41): n is a, c, g, or t
  misc_feature (56)..(56): n is a, c, g, or t
  misc_feature (57)..(57): n is a, c, g, or t
  misc_feature (58)..(58): n is a, c, g, or t
  misc_feature (63)..(63): n is a, c, g, or t
  misc_feature (68)..(68): n is a, c, g, or t
  misc_feature (70)..(70): n is a, c, g, or t
  misc_feature (71)..(71): n is a, c, g, or t
  misc_feature (78)..(78): n is a, c, g, or t
  misc_feature (86)..(86): n is a, c, g, or t
  misc_feature (87)..(87): n is a, c, g, or t
  misc_feature (88)..(88): n is a, c, g, or t
  misc_feature (91)..(91): n is a, c, g, or t
  misc_feature (106)..(106): n is a, c, g, or t
  misc_feature (114)..(114): n is a, c, g, or t
  misc_feature (116)..(116): n is a, c, g, or t
  misc_feature (117)..(117): n is a, c, g, or t
  misc_feature (119)..(119): n is a, c, g, or t
  misc_feature (128)..(128): n is a, c, g, or t
  misc_feature (129)..(129): n is a, c, g, or t
  misc_feature (132)..(132): n is a, c, g, or t
  misc_feature (133)..(133): n is a, c, g, or t
  misc_feature (134)..(134): n is a, c, g, or t
  misc_feature (135)..(135): n is a, c, g, or t
  misc_feature (136)..(136): n is a, c, g, or t
  misc_feature (137)..(137): n is a, c, g, or t
  misc_feature (138)..(138): n is a, c, g, or t
  misc_feature (139)..(139): n is a, c, g, or t
  misc_feature (140)..(140): n is a, c, g, or t
  misc_feature (141)..(141): n is a, c, g, or t
  misc_feature (142)..(142): n is a, c, g, or t
  misc_feature (143)..(143): n is a, c, g, or t
  misc_feature (144)..(144): n is a, c, g, or t
  misc_feature (145)..(145): n is a, c, g, or t
  misc_feature (146)..(146): n is a, c, g, or t
  misc_feature (161)..(161): n is a, c, g, or t
  misc_feature (162)..(162): n is a, c, g, or t
  misc_feature (163)..(163): n is a, c, g, or t
  misc_feature (164)..(164): n is a, c, g, or t
  misc_feature (165)..(165): n is a, c, g, or t
  misc_feature (166)..(166): n is a, c, g, or t
  misc_feature (167)..(167): n is a, c, g, or t
  misc_feature (168)..(168): n is a, c, g, or t
  misc_feature (169)..(169): n is a, c, g, or t
  misc_feature (170)..(170): n is a, c, g, or t
  misc_feature (171)..(171): n is a, c, g, or t
  misc_feature (172)..(172): n is a, c, g, or t
  misc_feature (173)..(173): n is a, c, g, or t
  misc_feature (174)..(174): n is a, c, g, or t
  misc_feature (175)..(175): n is a, c, g, or t
  misc_feature (176)..(176): n is a, c, g, or t
  misc_feature (177)..(177): n is a, c, g, or t
  misc_feature (178)..(178): n is a, c, g, or t
  misc_feature (179)..(179): n is a, c, g, or t
  misc_feature (180)..(180): n is a, c, g, or t
  misc_feature (181)..(181): n is a, c, g, or t
  misc_feature (182)..(182): n is a, c, g, or t
  misc_feature (183)..(183): n is a, c, g, or t
  misc_feature (184)..(184): n is a, c, g, or t
  misc_feature (185)..(185): n is a, c, g, or t
  misc_feature (186)..(186): n is a, c, g, or t
  misc_feature (187)..(187): n is a, c, g, or t
  misc_feature (188)..(188): n is a, c, g, or t
  misc_feature (189)..(189): n is a, c, g, or t
  misc_feature (190)..(190): n is a, c, g, or t
  misc_feature (191)..(191): n is a, c, g, or t
  misc_feature (192)..(192): n is a, c, g, or t
  misc_feature (193)..(193): n is a, c, g, or t
  misc_feature (194)..(194): n is a, c, g, or t
  misc_feature (195)..(195): n is a, c, g, or t
  misc_feature (196)..(196): n is a, c, g, or t
  misc_feature (197)..(197): n is a, c, g, or t
  misc_feature (198)..(198): n is a, c, g, or t
  misc_feature (199)..(199): n is a, c, g, or t
  misc_feature (200)..(200): n is a, c, g, or t
  misc_feature (201)..(201): n is a, c, g, or t
  misc_feature (202)..(202): n is a, c, g, or t
  misc_feature (203)..(203): n is a, c, g, or t
  misc_feature (204)..(204): n is a, c, g, or t
  misc_feature (205)..(205): n is a, c, g, or t
  misc_feature (206)..(206): n is a, c, g, or t
  misc_feature (207)..(207): n is a, c, g, or t
  misc_feature (208)..(208): n is a, c, g, or t
  misc_feature (209)..(209): n is a, c, g, or t
  misc_feature (210)..(210): n is a, c, g, or t
  misc_feature (211)..(211): n is a, c, g, or t
  misc_feature (212)..(212): n is a, c, g, or t
  misc_feature (213)..(213): n is a, c, g, or t
  misc_feature (214)..(214): n is a, c, g, or t
  misc_feature (215)..(215): n is a, c, g, or t
  misc_feature (216)..(216): n is a, c, g, or t
  misc_feature (217)..(217): n is a, c, g, or t
  misc_feature (218)..(218): n is a, c, g, or t
tccttgcagccatgctcctgggcaacccaggtctggtcttntctcgtctgagcccnnngtacnacgancnngcaagancccacctnnntgntgaggagaaatcctngcccgtgncnngnccaggaggnnccnnnnnnnnnnnnnnngaccaaaacacaggnnnnnnnnnnnnnnnnnnnnnnnnnnnnnnnnnnnnnnnnnnnnnnnnnnnnnnnnnnggataagcccacccagagaagtgtttccaatgctgcgacccgggtgtgtaggacggggaggtcacgatggcgcgacgtctgcagaaatttcatgaggaggtatcagtctagagttacccagggcctcgtggccggagaaactgcccagcagatctgtgaggacctcaggttgtgtataccttctacaggtcccctctgagccctctcaccttgtcctgtggaagaagcacag

SEQ ID NO: 819 - DNA, 567 bp, Homo sapiens
  misc_feature (1)..(567): 37384_at
  misc_feature (183)..(183): n is a, c, g, or t
  misc_feature (184)..(184): n is a, c, g, or t
  misc_feature (185)..(185): n is a, c, g, or t
  misc_feature (186)..(186): n is a, c, g, or t
  misc_feature (187)..(187): n is a, c, g, or t
  misc_feature (188)..(188): n is a, c, g, or t
  misc_feature (189)..(189): n is a, c, g, or t
  misc_feature (190)..(190): n is a, c, g, or t
  misc_feature (191)..(191): n is a, c, g, or t
  misc_feature (192)..(192): n is a, c, g, or t
  misc_feature (193)..(193): n is a, c, g, or t
  misc_feature (194)..(194): n is a, c, g, or t
  misc_feature (195)..(195): n is a, c, g, or t
  misc_feature (196)..(196): n is a, c, g, or t
  misc_feature (197)..(197): n is a, c, g, or t
  misc_feature (198)..(198): n is a, c, g, or t
  misc_feature (199)..(199): n is a, c, g, or t
  misc_feature (200)..(200): n is a, c, g, or t
  misc_feature (201)..(201): n is a, c, g, or t
  misc_feature (202)..(202): n is a, c, g, or t
  misc_feature (203)..(203): n is a, c, g, or t
  misc_feature (204)..(204): n is a, c, g, or t
  misc_feature (205)..(205): n is a, c, g, or t
  misc_feature (206)..(206): n is a, c, g, or t
  misc_feature (207)..(207): n is a, c, g, or t
  misc_feature (208)..(208): n is a, c, g, or t
  misc_feature (209)..(209): n is a, c, g, or t
  misc_feature (210)..(210): n is a, c, g, or t
  misc_feature (211)..(211): n is a, c, g, or t
  misc_feature (212)..(212): n is a, c, g, or t
  misc_feature (213)..(213): n is a, c, g, or t
  misc_feature (214)..(214): n is a, c, g, or t
  misc_feature (215)..(215): n is a, c, g, or t
  misc_feature (216)..(216): n is a, c, g, or t
  misc_feature (217)..(217): n is a, c, g, or t
  misc_feature (218)..(218): n is a, c, g, or t
  misc_feature (219)..(219): n is a, c, g, or t
  misc_feature (220)..(220): n is a, c, g, or t
  misc_feature (221)..(221): n is a, c, g, or t
  misc_feature (222)..(222): n is a, c, g, or t
  misc_feature (223)..(223): n is a, c, g, or t
  misc_feature (224)..(224): n is a, c, g, or t
  misc_feature (225)..(225): n is a, c, g, or t
  misc_feature (226)..(226): n is a, c, g, or t
  misc_feature (227)..(227): n is a, c, g, or t
  misc_feature (228)..(228): n is a, c, g, or t
  misc_feature (229)..(229): n is a, c, g, or t
  misc_feature (230)..(230): n is a, c, g, or t
  misc_feature (231)..(231): n is a, c, g, or t
  misc_feature (232)..(232): n is a, c, g, or t
  misc_feature (233)..(233): n is a, c, g, or t
  misc_feature (234)..(234): n is a, c, g, or t
  misc_feature (235)..(235): n is a, c, g, or t
  misc_feature (236)..(236): n is a, c, g, or t
  misc_feature (237)..(237): n is a, c, g, or t
  misc_feature (238)..(238): n is a, c, g, or t
  misc_feature (239)..(239): n is a, c, g, or t
  misc_feature (240)..(240): n is a, c, g, or t
  misc_feature (241)..(241): n is a, c, g, or t
gagggcagtccctcagaatcccagaggcagtcccagcctcagaacccaggataggaaatgggtgtgtttagtggggaaagggacggggtgcagacggcagggccagtatggggccccctccctctcctctcctctcctatggtgagcccagcgtgggcaccgggccgtctcagccgtgttccnnnnnnnnnnnnnnnnnnnnnnnnnnnnnnnnnnnnnnnnnnnnnnnnnnnnnnnnnnnaagccagttgggctgtgttaaaggaagcagtgtttttggtttgattctgcctctgtagctcaaggggggcagcccccagagtcctgtgcattctgccaaggctccatagctttgccaaatgcacggagctctgccattccggtgcagtgcaggccttgcgaagggtttatctgcgttcgtctcggtgggcttctcctgcatgggagttgtgttcctgtgcaagggggagctttgctcaggacaggatgactgtcttccctattcttagggacaagtcccaagatgccagaaaggcagtctcccaaggacccaccatgcagaagtgt

SEQ ID NO: 820 - DNA, 494 bp, Homo sapiens
  misc_feature (1)..(494): 38037_at
  misc_feature (124)..(124): n is a, c, g, or t
  misc_feature (184)..(184): n is a, c, g, or t
  misc_feature (237)..(237): n is a, c, g, or t
  misc_feature (238)..(238): n is a, c, g, or t
  misc_feature (239)..(239): n is a, c, g, or t
  misc_feature (240)..(240): n is a, c, g, or t
  misc_feature (241)..(241): n is a, c, g, or t
  misc_feature (242)..(242): n is a, c, g, or t
  misc_feature (243)..(243): n is a, c, g, or t
  misc_feature (244)..(244): n is a, c, g, or t
  misc_feature (245)..(245): n is a, c, g, or t
  misc_feature (246)..(246): n is a, c, g, or t
  misc_feature (247)..(247): n is a, c, g, or t
  misc_feature (248)..(248): n is a, c, g, or t
  misc_feature (249)..(249): n is a, c, g, or t
  misc_feature (250)..(250): n is a, c, g, or t
  misc_feature (251)..(251): n is a, c, g, or t
  misc_feature (252)..(252): n is a, c, g, or t
  misc_feature (253)..(253): n is a, c, g, or t
  misc_feature (254)..(254): n is a, c, g, or t
  misc_feature (255)..(255): n is a, c, g, or t
  misc_feature (256)..(256): n is a, c, g, or t
  misc_feature (257)..(257): n is a, c, g, or t
  misc_feature (258)..(258): n is a, c, g, or t
  misc_feature (259)..(259): n is a, c, g, or t
  misc_feature (260)..(260): n is a, c, g, or t
  misc_feature (261)..(261): n is a, c, g, or t
  misc_feature (262)..(262): n is a, c, g, or t
  misc_feature (447)..(447): n is a, c, g, or t
  misc_feature (448)..(448): n is a, c, g, or t
  misc_feature (449)..(449): n is a, c, g, or t
  misc_feature (450)..(450): n is a, c, g, or t
  misc_feature (451)..(451): n is a, c, g, or t
  misc_feature (452)..(452): n is a, c, g, or t
  misc_feature (453)..(453): n is a, c, g, or t
  misc_feature (454)..(454): n is a, c, g, or t
  misc_feature (455)..(455): n is a, c, g, or t
  misc_feature (456)..(456): n is a, c, g, or t
  misc_feature (457)..(457): n is a, c, g, or t
  misc_feature (458)..(458): n is a, c, g, or t
  misc_feature (459)..(459): n is a, c, g, or t
  misc_feature (460)..(460): n is a, c, g, or t
  misc_feature (461)..(461): n is a, c, g, or t
  misc_feature (462)..(462): n is a, c, g, or t
  misc_feature (463)..(463): n is a, c, g, or t
  misc_feature (464)..(464): n is a, c, g, or t
ccactctatgagttggacttcagtcttgcctaggcgattttgtctaccatttgtgttttgaaagcccaaggtgctgatgtcaaagtgtaacagatatcagtgtctccccgtgtcctctccctgncaagtctcagaagaggttgggcttccatgcctgtagctttcctggtccctcacccccatngccccaggcccacagcgtgggaactcactttcccttgtgtcaagacatttctnnnnnnnnnnnnnnnnnnnnnnnnnnactccatgcaggggtcagtgcagcagaggacagtctggagaaggtattagcaaagcaaaaggctgagaaggaacagggaacattggagctgactgttcttggtaactgattacctgccaattgctaccgagaaggttggaggtggggaaggctttgtataatcccacccacctcaccaaaacgannnnnnnnnnnnnnnnnngtcctttctggaagtttctggtgccatttc

SEQ ID NO: 821 - DNA, 431 bp, Homo sapiens
  misc_feature (1)..(431): 39582_at
  misc_feature (125)..(125): n is a, c, g, or t
ggccacaaatggagggattgtcctttcaagcaccacagcttcagataaaattagtactttcaaatattgtccactttaacttaaaaaattctagagggattatattggagactcaactgcccttnggttttagtttataaaatggcctagtactgtggaattttaattttagaaagtcttagcatcagatcataaacattcattaaaagaactcacatcccatctgaaacttcccaggggagttgggattcttagtagattggtagaaaggggctcattttctactgcatttcccatttttggtatcttgttcagcatgttttatttttatttcttgtctgcagaacatcctatatttatgagaacattctttaagaagaccaccacatagaataccccttcctatcagctcgctctgatttagccttaat

SEQ ID NO: 822 - DNA, 408 bp, Homo sapiens
  misc_feature (1)..(408): 40420_at
  misc_feature (64)..(64): n is a, c, g, or t
  misc_feature (65)..(65): n is a, c, g, or t
  misc_feature (66)..(66): n is a, c, g, or t
  misc_feature (67)..(67): n is a, c, g, or t
  misc_feature (68)..(68): n is a, c, g, or t
  misc_feature (69)..(69): n is a, c, g, or t
  misc_feature (70)..(70): n is a, c, g, or t
  misc_feature (71)..(71): n is a, c, g, or t
  misc_feature (72)..(72): n is a, c, g, or t
  misc_feature (73)..(73): n is a, c, g, or t
  misc_feature (74)..(74): n is a, c, g, or t
  misc_feature (75)..(75): n is a, c, g, or t
  misc_feature (76)..(76): n is a, c, g, or t
  misc_feature (77)..(77): n is a, c, g, or t
  misc_feature (78)..(78): n is a, c, g, or t
  misc_feature (79)..(79): n is a, c, g, or t
  misc_feature (80)..(80): n is a, c, g, or t
  misc_feature (81)..(81): n is a, c, g, or t
  misc_feature (82)..(82): n is a, c, g, or t
  misc_feature (83)..(83): n is a, c, g, or t
  misc_feature (84)..(84): n is a, c, g, or t
  misc_feature (85)..(85): n is a, c, g, or t
  misc_feature (86)..(86): n is a, c, g, or t
  misc_feature (87)..(87): n is a, c, g, or t
  misc_feature (88)..(88): n is a, c, g, or t
  misc_feature (89)..(89): n is a, c, g, or t
  misc_feature (90)..(90): n is a, c, g, or t
  misc_feature (91)..(91): n is a, c, g, or t
  misc_feature (92)..(92): n is a, c, g, or t
  misc_feature (93)..(93): n is a, c, g, or t
  misc_feature (94)..(94): n is a, c, g, or t
  misc_feature (95)..(95): n is a, c, g, or t
  misc_feature (96)..(96): n is a, c, g, or t
  misc_feature (97)..(97): n is a, c, g, or t
  misc_feature (98)..(98): n is a, c, g, or t
  misc_feature (99)..(99): n is a, c, g, or t
  misc_feature (100)..(100): n is a, c, g, or t
  misc_feature (101)..(101): n is a, c, g, or t
  misc_feature (102)..(102): n is a, c, g, or t
  misc_feature (103)..(103): n is a, c, g, or t
  misc_feature (104)..(104): n is a, c, g, or t
  misc_feature (105)..(105): n is a, c, g, or t
  misc_feature (106)..(106): n is a, c, g, or t
  misc_feature (107)..(107): n is a, c, g, or t
  misc_feature (354)..(354): n is a, c, g, or t
ggcaccggaggcatggaaaagcacaggctgtactgccaggctgcgatgcgtgctggcccccgcnnnnnnnnnnnnnnnnnnnnnnnnnnnnnnnnnnnnnnnnnnnntccacaacccagtctgctccatagcactctggcccaccctgtctgcaggtgaaacaggagggctgtttgcctctgccccatccccccgactgtgttcaggagtcccaccttgcatttcagacctgggctggcagtctgttggacttctcttcaggaagaaaaagcatcagggggaaatggaatgcccctgccccaggaacatggcagaagcacaggttctgtacctcagatggactcctgctgggcnttcggggtctcagttggcttcccccagattctgattctacagctgcagaatgta

SEQ ID NO: 823 - DNA, 151 bp, Homo sapiens
  misc_feature (1)..(151): 48808_at
  misc_feature (39)..(39): n is a, c, g, or t
  misc_feature (76)..(76): n is a, c, g, or t
gttaggcaatcattctagggcagaaagaagtacaggatnggaagagcataatacactgtttttctcaacaaggagncagtatgtacacagtcataatgatgtgactgcttagcccctaaatatggtaactactctgggacaatatgggagg

SEQ ID NO: 824 - DNA, 189 bp, Homo sapiens
  misc_feature (1)..(189): 60084_at
ctagcaatgatattctcagttgtttctctcttgtggtgcagagttgcattgggttttctacattttcccactgagtcttccctgttgtaaaagggagttagaaagctgctaactaggattaagtttatagtcagggaacagtgttataatctcttcctagctaatgggcttactcaaagattcaccacc

SEQ ID NO: 825 - DNA, 97 bp, Homo sapiens
  misc_feature (1)..(97): AFFX-M27830_5_at
tagttttaccctactgatgatgtgttgttgccatggtaatcctgctcagtacgagaggaaccgcaggttcagacatttggtgtatgtgcttggctga

SEQ ID NO: 826 - DNA, 791 bp, Homo sapiens
  misc_feature (1)..(791): AFFX-r2-Hs28SrRNA-3_at
cgaaggcccgcggcgggtgttgacgcgatgtgatttctgcccagtgctctgaatgtcaaagtgaagaaattcaatgaagcgcgggtaaacggcgggagtaactatgactctcttaaggtagccaaatgcctcgtcatctaattagtgacgcgcatgaatggatgaacgagattcccactgtccctacctactatccagcgaaaccacagccaagggaacgggcttggcggaatcagcggggaaagaagaccctgttgagcttgactctagtctggcacggtgaagagacatgagaggtgtagaataagtgggaggcccccggcgcccccccggtgtccccgcgaggggcccggggcggggtccgcggccctgcgggccgccggtgaaataccactactctgatcgttttttcactgacccggtgaggcgggggggcgagcccgaggggctctcgcttctggcgccaagcgcccgcccggccgggcgcgacccgctccggggacagtgccaggtggggagtttgactggggcggtacacctgtcaaacggtaacgcaggtgtcctaaggcgagctcagggaggacagaaacctcccgtggagcagaagggcaaaagctcgcttgatcttgattttcagtacgaatacagaccgtgaaagcggggcctcacgatccttctgaccttttgggttttaagcaggaggtgtcagaaaagttaccacagggataactggcttgtggcggccaagcgttcatagcgacgtcgctttttgatccttcgatgtcggctct
